(19) United States
(12) Patent Application Publication
(10) Pub. No.: US 2011/0190166 A1
(43) Pub. Date: Aug. 4, 2011

(54) ERYTHROID PROGENITOR CELLS AND METHODS FOR PRODUCING PARVOVIRUS B19 THEREIN

(76) Inventors: Susan Wong, Columbia, MD (US); Neal S. Young, Washington, DC (US); Ning Zhi, Rockville, MD (US); Kevin Brown, Kensington, MD (US)

(21) Appl. No.: 12/301,960

(22) PCT Filed: May 25, 2007
(86) PCT No.: PCT/US2007/012645

§ 371 Date: Nov. 21, 2008

Related U.S. Application Data
(60) Provisional application No. 60/808,904, filed on May 26, 2006.

(51) Int. Cl. C12N 7/00; C12Q 1/70; C12N 5/0789; C40B 40/00

(52) U.S. Cl. 506/13; 435/235.1; 435/5; 435/325

(57) ABSTRACT

The disclosure relates to erythroid progenitor cells and methods for producing parvovirus B 19 in the cells. The invention includes transformed and/or immortalized CD36+ erythroid progenitor cells permissive for B19 infection and methods for producing useful quantities of B 19 in the cells described herein. Infectious virus produced by the cells of the disclosure is useful for identifying and developing therapeutically effective compositions for treatment and/or prevention of human parvovirus B 19 infections.

### CROSS REFERENCE TO RELATED APPLICATIONS

[0001] This application is being filed on 25 May 2007, as a PCT International Patent application in the name of The Government of the United States of America as represented by the Secretary, Department of Health and Human Services, applicant for the designation of all countries except the US, and Susan Wong, Neal S. Young, citizens of the U.S., Ning Zhi, a citizen of China, and Kevin Brown, a citizen of the United Kingdom, applicants for the designation of the US only, and claims priority to U.S. Application Ser. No. 60/808,904, filed May 26, 2006, which application is incorporated by reference.

### STATEMENT OF RIGHTS TO INVENTIONS MADE UNDER FEDERALLY SPONSORED RESEARCH AND DEVELOPMENT

[0002] Part of the work performed during the development of this invention utilized United States government funds under the Division of Intramural Research, National Heart, Lung and Blood Institute.

### REFERENCE TO A CD LISTING APPENDIX

[0003] Three Compact Disc-Recordable (CD-Rs) are provided with this patent document. The CD-Rs are formatted in IBM-PC format and are compatible with the MS-Windows operating system. Each CD-R includes the following with the noted creation date: Sequence Listing (SEQ ID NOs:1-322) (dated May 25, 2007; size: 1,275 kilobytes).

[0004] The content of these files are incorporated by reference herein. The files on each CD-R are accessible using a text-based editor.

### BACKGROUND OF THE INVENTION

[0005] Human parvovirus B19 (B19) is the only member of the Parvoviridae family known to cause diseases in humans. B19 infection causes fifth disease in children, polyarthropathy syndromes in adults, transient aplastic crisis in patients with underlying chronic hemolytic anemia, and chronic anemia due to persistent infection in immunocompromised patients. Hydrops fetalis and fetal death have been reported after maternal infection with B19 during pregnancy (Brown et al., 1994, Crit. Rev. Oncol./Hematol., 16:1-13).

[0006] B19 exhibits a selective tropism for erythroid progenitor cells. The virus can be cultured in primary erythroid progenitor cells from bone marrow or from fetal liver, and cell lines such as UT7/Epo or KU812Ep6. (Ozawa et al., 1986, Science 233:883-886; Brown et al., 1991, J. Gen. Vir., 72:741-745; Komatsu et al., 1993, Blood 82:456-464; Shimomura et al., 1992, Blood 79:18-24; Miyagawa et al., 1999, J. Virol. Methods 83:45-54). Although these cells can be infected, very little virus is produced. The selective tropism of the virus is mediated in part by neutral glycolipid globoside (blood group P antigen), which is present on primary cells of the erythroid lineage (Brown et al., 1993, Science, 262:114-117). The presence of globoside on the surface of a cell is a determinant of viral tropism. B19 has a cytotoxic effect on primary erythroid progenitor cells in bone barrow and causes interruption of erythrocyte production. Human bone marrow cells that lack globoside on the cell surface are resistant to parvovirus B19 infection (Brown et al., 1994, N. Engl. J. Med., 33:1192-1196).

[0007] Currently, the most reliable source of large amounts of B19 is phlebotomy of viremic donors. Cells and methods for consistently producing infectious B19 in a significant quantity in cell culture are limited. Thus, there remains a need to develop cells capable of producing useful amounts of B19, particularly infectious B19. Infectious virus is useful for identifying and developing therapeutically effective compositions for treatment and/or prevention of human parvovirus B19 infections, such as for example, antibodies, attenuated vaccines, and chimeric viral capsid proteins comprising antigenic epitopes.

### SUMMARY OF THE INVENTION

[0008] One aspect of the invention is directed to methods of producing parvovirus B19. Virus produced by the methods of the invention is useful for identifying and developing therapeutically effective compositions for treatment and/or prevention of human parvovirus B19 infections.

[0009] The methods of producing parvovirus B19 generally include introducing a parvovirus B19 genome into a CD36⁺ erythroid progenitor cell and culturing the cell under conditions to provide for replication of parvovirus B19 genome. In some embodiments, parvovirus B19 can be introduced into CD36⁺ erythroid progenitor cells by contacting the cells with parvovirus B19 isolated from serum. In some embodiments, parvovirus B19 can be introduced into the CD36⁺ erythroid progenitor cells with a vector encoding an infectious clone of parvovirus B19 into the cells. In an embodiment, infectious clone includes a nucleic acid sequence having at least 90% nucleic acid identity to SEQ ID NO:1 or SEQ ID NO:2.

[0010] The erythroid progenitor cells, which are termed CD36⁺, can be produced from hematopoietic stem cells expressing cell surface markers such as CD34 and/or CD133 by culturing the cells in expansion media comprising stem cell factor (SCF), interleukin 3 (IL-3), and erythropoietin under conditions that allow for expansion and differentiation of the cells to a population of cells having at least 25 to 100% CD36⁺ cells. In some embodiments, expansion media comprises stem cell factor (SCF), interleukin 3 (IL-3), hydrocortisone, and erythropoietin in amounts that allow for expansion and differentiation of the cells to a population of cells having at least 25 to 100% CD36⁺ cells. In an embodiment, the expansion media comprises 5 ng/ml IL-3, 100 ng/ml recombinant human SCF, and 3 IU/ml recombinant human erythropoietin. In an embodiment, the expansion media comprises 1 nM hydrocortisone, 5 ng/ml IL-3, 100 ng/ml recombinant human SCF, and 3 IU/ml recombinant human erythropoietin. The expansion medium can have ranges of the growth factors as have been described in the art. In some embodiments, the erythroid progenitor cells are frozen, thawed, and cultured in expansion medium.

[0011] The hematopoietic stem cells are selected from a variety of source tissues for the presence of a cell surface marker such as CD34 and/or CD133. Some hematopoietic stem cells have both CD34 and CD133 on the cell surface. The source tissues include cord blood, G-CSF mobilized stem cells (or termed peripheral blood stem cells, “PBSC”), bone marrow, peripheral blood, embryonic tissue, and fetal tissue. The hematopoietic stem cells are cultured in the expansion media for about 4 days under conditions that allow for expansion and differentiation of the cells, diluted in expansion media, and the diluted cells are cultured for about an additional 4 days under conditions that allow for expansion and differentiation of the cells.

[0012] In some embodiments, the CD36 erythroid progenitor cells comprise globoside and are non-enucleated. In other embodiments, the CD36⁺ erythroid progenitor cells further comprise hemoglobin. The CD36⁺ erythroid progenitor cells comprise at least one of the following characteristics selected from the group consisting of non-enucleated; CD44⁺, CD34⁻, CD19⁻, CD10⁻, CD4⁻, CD3⁻, CD2⁻, hemoglobin; globoside; or a combination thereof. In some embodiments, the CD36⁺ erythroid progenitor cells are CD36⁺, CD44⁺, CD235a⁺, CD34⁻, CD19⁻, CD10⁻, CD4⁻, CD3⁻, and CDT. In some embodiments, the erythroid progenitor cell population has about the same percentage of cells that are CD36+ and globoside+. In some embodiments, the population has at least 25% of the cells positive for globoside and CD36. In some embodiments, the population has at least 60% of the cells positive for globoside and CD36. In some embodiments, at least 25% to 100% of the erythroid progenitor cells are CD36+ and globoside+cells, and less than 70% of the cell population are CD33+. In some embodiments, the population has at least 60% of the cells positive for globoside and CD36 and at least 50% cells positive for glycophorin by day 8 in culture.

[0013] The methods of the disclosure also include detecting reproduction of the parvovirus B19 viral transcripts, viral genome, and viral products. In some embodiments, production of the parvovirus B19 viral transcripts are detected by detecting B19 spliced capsid transcripts, unspliced capsid or NS protein transcripts or other B19 viral transcripts in the infected cells. In some embodiments, B19 capsid protein is detected by binding to a specific antibody for B19 such as an antibody for the B19 capsid protein. In some embodiments, B19 viral transcripts is detected using reverse transcription PCR (RT-PCR) or by quantitative reverse transcription PCR (qRT-PCR). In other embodiments, erythroid progenitor cells infected with B19 are detected by cytopathology and are detected as giant pronormoblasts (also described as lantern cells). One or more of these techniques may be used in conjunction with one another to confirm B19 infection.

[0014] Reproduction of the parvovirus B19 can also be detected by detecting B19 viral DNA production in the infected cells. Preferably, replication of the parvovirus B19 viral genome in the CD36⁺ erythroid progenitor cells is greater than replication of the viral genome in UT7/Epo-S1 cells. In an embodiment, replication of the parvovirus B19 viral genome in the CD36⁺ erythroid progenitor cells is at least 10 fold greater compared to UT7/Epo-S1 cells. In another embodiment, replication of the parvovirus B19 viral genome in the CD36⁺ erythroid progenitor cells is at least 100 fold greater compared to UT7/Epo-S1 cells. In yet another embodiment, replication of the parvovirus B19 viral genome in the CD36⁺ erythroid progenitor cells is at least 500 fold greater compared to UT7/Epo-S1 cells. Preferably, parvovirus B19 production is greater in CD36⁺ erythroid progenitor cells compared to UT7/Epo-S1 cells. In an embodiment, parvovirus B19 production in CD36⁺ erythroid progenitor cells is increased at least 1.5 log compared to UT7/Epo-S1 cells. Preferably, the replicated parvovirus B19 is infectious.

[0015] Detection of infectious B19 virus can be assessed by the presences of B19 DNA by in vitro assays such as PCR but the presence of B19 DNA is not necessarily indicative of the presence of infectious virus. The presence of infectious virus can be determined by an in vitro bioassay using B19 containing material to infect CD36+ cells. In this case, a DNA increase or RNA production would indicate the presence of infectious virus

[0016] Reproduction of infectious parvovirus B19 in infected CD36⁺ erythroid progenitor cells can also be detected by contacting uninfected permissive cells with supernatant from the infected CD36⁺ erythroid progenitor cells and analyzing the contacted permissive cells for B19 viral transcripts, B19 viral proteins, or increase viral DNA production. Detection of B19 viral transcripts, B19 viral proteins, or increase viral DNA production in the contacted permissive cells indicates that the parvovirus B19 is infectious. The permissive cells can be erythroid progenitor cells found in bone marrow or fetal liver, UT7/Epo cells, UT7/Epo-S1 cells, or KU812Ep6 cells. In an embodiment, the permissive cells are erythroid progenitor cells that are CD36⁺, CD44⁺, CD235a⁺, CD34⁻, CD19⁻, CD10⁻, CD4⁻, CD3⁻, CD2⁻, and globoside positive.

[0017] In another aspect, the disclosure also provides a cell population comprising erythroid progenitor cells, wherein at least 25% to 100% of the erythroid progenitor cells are CD36+ and globoside+cells, and less than 70% of the cell population are CD33+. In other embodiments, CD36+ erythroid progenitor cells are produced by a method comprising: culturing hematopoietic stem cells in expansion media comprising stem cell factor (SCF), interleukin 3 (IL-3), and erythropoietin under conditions that allow for expansion and differentiation of the cells to a population of cells having at least 25% CD36⁺ cells. In an embodiment, the hematopoietic stem cells have CD34, CD133, or both on the cell surface. In some embodiments, the expansion media comprises 10⁻⁶ M hydrocortisone, 5 ng/ml, IL-3, 100 ng/ml recombinant human SCF, and 3 IU/ml recombinant human erythropoietin. In some embodiments, the hematopoietic stem cells are cultured in the expansion media for about 4 days under conditions that allow for expansion and differentiation of the cells, diluted in expansion media, and the diluted cells are cultured for about an additional 4 days under conditions that allow for expansion and differentiation of the cells. In some embodiments, the cell population or erythroid progenitor cells comprise CD36⁺ erythroid progenitor cells that are CD36⁺, CD44⁺, CD235a⁺, CD34⁻, CD19⁻, CD10⁻, CD4⁻, CD3⁻, and CDT.

[0018] Another aspect of the invention is immortalized erythroid progenitor cells that are permissive to parvovirus B19 infection and methods of making the immortalized-cells. The immortalized erythroid progenitor cells can be produced by culturing hematopoietic cells in expansion media under conditions that allow for expansion and differentiation of the cells to a population of at least 25 to 100% CD36⁺ cells; and immortalizing the CD36⁺ erythroid progenitor cells. In some embodiments, the cells can be immortalized by transforming the CD36⁺ erythroid progenitor cells with a viral vector comprising a nucleic acid encoding a SV40 large T-antigen, hTERT (human telomerase reverse transcriptase gene), and/or HPVtype 16 E6/E7. In some embodiments, the viral vector comprises adenovirus, lentivirus, retrovirus, or adeno-associated virus (AAV). In other embodiments, the cells are immortalized with Epstein Barr virus.

[0019] In some embodiments, the method for immortalizing the CD36⁺ erythroid progenitor cells includes culturing the hematopoietic stem cells in expansion media for about 4 days under conditions that allow for expansion and differentiation of the cells, diluting the cells in expansion media, and culturing the diluted cells for about 4 days under conditions that allow for expansion and differentiation of the cells. The immortalized erythroid progenitor cells comprise globoside and are non-enucleated. In some embodiments, the immortalized cells further comprise hemoglobin. The immortalized erythroid progenitor cells comprise at least one of the following characteristics selected from the group consisting of: non-enucleated; CD44⁺, CD34⁻, CD19⁻, CD10⁻, CD4⁻, CD3⁻, CDT, hemoglobin; globoside; or a combination thereof. In some embodiments, the immortalized CD36⁺ erythroid progenitor cells are globoside+, CD36⁺, CD44⁺, CD235a⁺, CD34⁻, CD19⁻, CD10⁻, CD4⁻, CD3⁻, and CDT. In some embodiments, at least 25% to 100% of the erythroid progenitor cells are CD36+ and globoside+cells, and less than 70% of the cell population are CD33+. In an embodiment, the immortalized erythroid progenitor cells can divide at least 2 to 50 times. In an embodiment, the cells are a continuous cell line that divides indefinitely.

[0020] Another aspect of the invention includes diagnostic kits and assays. The kits and assays can be used to detect, for example, antibodies to parvovirus B19. In an embodiment, the kit includes a composition comprising parvovirus B19 particles produced by the CD3+ erythroid progenitor cells or immortalized CD36⁺ erythroid progenitor cells of the invention and instructions for using the parvovirus B19 produced by the cells to detect antibodies to parvovirus B19. In other embodiments, the kits can include probes or primers for detecting the presence of viral transcripts. In a specific embodiment, viral transcripts of capsid protein and/or NS protein are detected. In other embodiments an increase in viral RNA or DNA may be detected.

[0021] In an embodiment, diagnostic kits or assays can be used to identify neutralizing antibodies. Antibodies produced against B19 may not be effectively neutralizing or partially neutralizing.

[0022] In an embodiment, diagnostic kits or assays can be used to identify infectious B19 virions. B19 has been known to produce 1 infectious particle in 10e3 to 10e5 particles. B19 DNA has also been known to persist for years after infection of an individual. In an embodiment, CD36⁺ cells allow a determination the presence of infectious virions by the production of B19 transcripts or increasing DNA production.

[0023] In other embodiments diagnostic kits and assays may also include agents for the detection of biomarkers or genes differentially expressed in B19 virus infected cells. The agents for detection include antibodies, probes, primer, and agents for assay of activity of the biomarker. Biomarkers of B19 infected cells include one or more of differentially expressed genes as shown in Table 15, comparing timepoint zero infection to any other timepoint such as 3, 6, 12, 24, and 48 hours and even up to 5 days post infection. In some embodiments, the diagnostic assay or kit may include agents for detecting at least one of 1, 2, 3, 4, 5, 6, 7, 8, 9, 10, and up to all of the 309 genes. Some of the genes differentially expressed may be detected as secreted products. In other embodiments, the genes selected are differentially (increased or decreased) expressed at least two fold at 48 hours post infection as compared to uninfected cells.

[0024] In some embodiments, a method of detecting a parvovirus B19 infection comprises contacting the CD36+ erythroid progenitor cell with a sample; culturing the cells under conditions suitable for viral replication; and detecting the presence of the virus in the cell. In some embodiments, the CD36⁺ erythroid progenitor cells are cultured in expansion media comprising stem cell factor (SCF), interleukin 3 (IL-3), and erythropoietin under conditions that allow for expansion and differentiation of the cells to a population of cells having at least 25% CD36⁺ cells. In an embodiment, the expansion media comprises 10⁻⁶M hydrocortisone, 5 ng/ml IL-3, 100 ng/ml recombinant human SCF, and 3 IU/ml recombinant human erythropoietin. In some embodiments, the CD36⁺ erythroid progenitor cells are CD36⁺, CD44⁺, CD235e, CD34⁻, CD19⁻, CD10⁻, CD4⁻, CD3⁻, CD2⁻, non-enucleated, may have hemoglobin or may have globoside and combinations thereof. In an embodiment, the population of CD36⁺ erythroid progenitor cells comprise at least 25% to 100% CD36+ cells. In an embodiment, the population of CD36⁺ erythroid progenitor cells comprise at least 25% CD36+ cells and 25% globoside positive cells. In some embodiments, at least 25% to 100% of the erythroid progenitor cells are CD36+ and globoside+cells, and less than 70% of the cell population are CD33⁺.

[0025] In other embodiments, the method further comprises detecting reproduction of the parvovirus B19 viral genome, transcripts, or viral protein. In some embodiments, detection of reproduction of the parvovirus B19 viral genome comprises detecting B19 DNA, spliced capsid transcripts, unspliced capsid or NS protein transcripts, or B19 capsid protein in the infected cells. In an embodiment, the B19 capsid protein is detected by binding to a specific antibody for B19 capsid protein. In an embodiment, the B19 transcripts are detected using RT-PCR or by qRT-PCR. In an embodiment, detection of reproduction of the parvovirus B19 viral genome comprises detecting B19 viral DNA in the cell.

[0026] In some embodiments, a method of detecting a parvovirus B19 infection comprises contacting a cell or population of CD36+ erythroid progenitor cell with a sample; culturing the cells under conditions suitable for viral replication; and detecting the gene expression profile of at least one of the genes of Table 15 and at least one parvovirus B19 viral genome, transcript, or viral protein. In some embodiments, expression of at least one or all of the genes of Table 16 are detected. In some embodiments, expression of the genes is detected at 6 and/or 48 hours post infection. In some embodiments, the gene expression is detected by an oligonucleotide that specifically binds to the polynucleotide encoding the gene.

[0027] Another aspect of the disclosure provides for kits for diagnosis of B19 infection. In an embodiment, a kit comprises a composition comprising a CD36+ erythroid progenitor cell and a composition comprising a parvovirus B19 virus sample. In an embodiment, the parvovirus B19 composition comprises at least 10³ genomes/ml of parvovirus B19. In other embodiments, a kit for detecting or diagnosing parvovirus B19 infection, comprises: a CD36+ erythroid progenitor cell as described herein, and at least one oligonucleotide that specifically binds to a) a parvovirus B19 genome, or b) at least one viral transcript and/or an antibody that specifically binds to a viral protein. In some embodiments, the kit for diagnosing or detecting, further comprises a composition comprising a parvovirus B19 virus sample. In other embodiments, a kit for detecting or diagnosing parvovirus B19 infection, comprises: a) a CD36+ erythroid progenitor cell as described herein and b) at least one oligonucleotide that specifically binds to parvovirus B19 genome or at least one viral transcript and/or an antibody that specifically binds to a viral protein; and c) at least one oligonucleotide that specifically binds to at least one of the genes of Table 15. In some embodiments, the kit for diagnosing or detecting, further comprises a composition comprising a parvovirus 1319 virus sample.

[0028] Another aspect of the disclosure provides a microarray. In some embodiments, a microarray comprises agents that bind to 400 genes or less including at least one or all of the genes of Table 15. In other embodiments, the microarry comprises agents that bind to 400 genes or less including at least one or all of the genes of Table 16. In yet another embodiment, a microarray comprises agents that bind to 400 genes or less including at least one or all of the genes of Table 16 and at least one or all of the parvovirus B19 transcripts. In some embodiments, a microarray comprises agents that bind to 400 genes or less including at least one or all parvovirus B19 transcripts or parvovirus B19 genome. Agents include oligonucleotide probes, or antibodies or antibody fragments.

[0029] Parvovirus B19 virus particles and/or clones produced by the cells or methods of the invention can be utilized to form immunogenic compositions to prepare therapeutic antibodies or vaccine components. In an embodiment, the immunogenic composition comprises parvovirus B19 particles produced by the immortalized CD36⁺ erythroid progenitor cells. The parvovirus B19 particles can be attenuated or heat killed.

### BRIEF DESCRIPTION OF THE DRAWINGS

[0030] FIG. 1. Rapid CD36⁺ proliferation in expansion medium (numbers of cells/days of culture). Three sets of purified CD34+ cells derived from G-CSF mobilized PBSC were cultured in expansion media. To determine if cells would survive and proliferate after cryopreservation, two of the sets were frozen at day 4 in culture and revived.

[0031] FIG. 2A. Comparison of cell proliferation of CD36+ day 8 cells which are uninfected and cells infected with B19. FIG. 2B. Comparison of cell proliferation of day 8 UT7/Epo-S1 uninfected cells and cells infected with B19.

[0032] FIG. 3A. Daily timecourse evaluating B19 transcript production in CD36+ cells infected with serial dilution of B19 (copies/μL). B19 NS transcript analyzed by qRT-PCR.

[0033] FIG. 3B. B19 CP (capsid) transcript analyzed by qRT-PCR.

[0034] FIG. 4. NS transcript production on day 2 post infection in CD36+ day 7 cells infected with serial dilutions of B19 containing plasma (V1). Infectious virus in viremic sample V1 can be detected to 10e2/mL which is 2-logs higher sensitivity than that detected in UT7/Epo-S1 cells.

[0035] FIG. 5A. NS transcript production during an hourly time course in UT7/Epo-S1 and CD36+ day 8 cells. Compared to B19 transcripts produced in UT7/Epo-S1 cells, CD36⁺ day 8 cells generated a 1-2 log greater amount of B19 transcripts at each timepoint. FIG. 5B. UT7/Epo-S1 and CD36+ day 8 CP transcript production during an hourly time course. A 1-2 log increase in B19 transcripts in CD36+ day 8 cells is shown at each timepoint.

[0036] FIG. 6. Comparison by qPCR analysis of CD36⁺ day 8 cells and UT7/Epo-S1 cells for viral B19 DNA production in cells infected with serial dilutions of B19 containing plasma.

[0037] FIG. 7. CD36+ cells infected with supernatants from cellular lysates from three successive rounds of infection. Initially, cells were infected with B19 containing plasma V1 and the cellular lysate was freeze-thawed three times and used to inoculate naïve cells. Similar was done for two successive passages of the virus.

[0038] FIG. 8 NS transcripts. CD36+ day 8 cells were transfected with the B19 infectious clone, pB19-M20, in two experiments, pB19-M20 (1) and (2). Transfected cells were harvested after three days (Transfection D3) and cellular lysates were used to infect naïve cells (Infection D0) and finally, the infected cells were harvested on day 3 (Infection D3.) qRT-PCR was used to analyze the transcript production at each of the timepoints.

[0039] FIG. 9 shows the increase in B19 DNA production in CD36⁺ erythroid progenitor cells that were transformed using a recombinant adenovirus containing SV40 large T antigen 3 days post infection (output) with B19 as compared to the input virus.

[0040] FIG. 10 shows B19 NS transcripts detected by qRT-PCR in adenovirus-SV40 transformed CD36⁺ erythroid progenitor cells infected with B19 at 0 to 3 days post infection. The data in FIG. 10 indicates that the transformed CD36⁺ erythroid progenitor cells infected with B19 are producing viral genomes.

[0041] FIG. 11 shows the time course of expansion of CD133+ stem cells in expansion medium.

[0042] FIG. 12A Immunofluorescence Assay of CD133⁺ selected cells cultured in expansion media for 8 days and then infected with B19. Antibody 521-5D against the B19 capsid region (bright fluorescence in figure). CD133⁺ selected PBSC expanded and differentiated in expansion media show similar sensitivity as CD34⁺ selected PBSC to B19 infection. FIG. 12B Immunofluorescence Assay of CD36+ day 8 cells transfected with pB19-M20. Antibody 521-5D against the B19 capsid region (fluorescence in figure).

[0043] FIG. 13 Differentially expressed genes involved in regulation of G1/S transition during B19 infection.

### DETAILED DESCRIPTION OF THE INVENTION

### I. Definitions

[0044] The term “parvovirus B19”, “B19”, “B19V”, “B19 virus”, “B19 clone”, “B19 isolate”, or B19 means an isolate, clone or variant 1319 viral genome of parvovirus B19 or parvovirus B19 virus particle of the family Parvoviridae including genotypes 1, 2, and 3.

[0045] “Variants” of the parvovirus B19 viral genome refer to a sequence of a viral genome that differs from a reference sequence and includes “naturally occurring” variants as well as variants that are prepared by altering of one or more nucleotides.

[0046] An “infectious clone” of parvovirus B19 as used herein refers to a full-length genome or portion of a genome of a parvovirus B19 isolate cloned into a replicable vector that provides for amplification of the viral genome in a cell. In some embodiments, a portion of the parvovirus B19 genome comprises or consists of nucleic acid sequence encoding at least one ITR, VP2, NS, and 11-kDa in a single replicable vector. In other embodiments, the viral genome is a full-length genome. The replicable vector provides for introduction and amplification of the viral genome in a wide variety of prokaryotic and eukaryotic cells, whether or not they have globoside.

[0047] The term “hematopoietic stem cell” or “hemapoeitic stem cell” as used herein refers to a precursor cell that is capable of differentiating to a red blood cell. In some embodiments, precursor cells can be isolated from sources including, but not necessarily limited to: cord blood, G-CSF mobilized stem cells (or termed peripheral blood stem cells, “PBSC”), bone marrow, peripheral blood, embryonic tissue, and fetal tissue Generally, hematopoietic stem cells may be found in a variety of sources of tissues. In some embodiments, hematopoietic stem cells derived from (but not limited to) the above sources are selected by cell surface antigens such as (but not limited to) CD34 or CD133. Other markers of hematopoietic stem cells may include CD33, CD34, CD90, CD110, CD111, CD112, CD117, CD123, CDw131, CD133, CD135, CD173, CD174, CD176, CD243, CD277, CD280, CD297, CD318, CD324, or CDw388.

[0048] The term “erythroid progenitor cell” as used herein refers to a red blood cell precursor cell that is capable of differentiating to a red blood cell.

[0049] The term “CD36⁺ cells” or “primary CD36⁺ cells,” or “CD36⁺ erythroid progenitor cells” refers to cells generated through the culture of hematopoietic stem cells or hematopoietic precursor cells grown in the defined expansion media for any given number of days after introduction into culture. Related terms defining the number of days in which the cells are in culture will be defined in the following manner: “CD36⁺ day 4 cells,” “CD36⁺ day 5 cells,” “CD36⁺ day 6 cells,” “CD36⁺ day 7 cells,” “CD36⁺ day 8 cells,” and so on.

[0050] “Secondary cell” as used herein refers to cells with an extended replicative capacity or life span in culture as compared to a primary culture of cells of the same cell type but do not continue to divide indefinitely and eventually senesce and die. In some embodiments, secondary cells can be prepared by growing the cells in specialized media which induce cells to differentiate and have characteristics different from the primary cells in which they were derived. In some embodiments, secondary cells can be prepared by transformation of primary cells with a vector comprising a polynucleotide that inactivates tumor suppressor genes in the transformed cells that results in a replicative senescent state or a polynucleotide that regulates the expression or activity of telomerase. Secondary cells can continue growth in culture from about two divisions or generations to about 100 divisions or generations. In some embodiments, secondary cells can continue growth through at least 10 to 30 divisions. In some embodiments, the doubling time of the secondary cells is from about 12 hours to about 36 hours.

[0051] “Transformed cells” as used herein refers to cells that have at least one of the growth properties selected from the group consisting of anchorage independent, loss of contact inhibition, growth in suspension, growth factor independent, shorter population doubling time, increased life span of about 2 to 50 generations and combinations thereof. In some embodiments, transformed cells refer to cells that have been infected with or transfected with a vector, including a vector comprising the SV40 large T antigen.

[0052] “Immortalized cells” as used herein refers to cells that have an increased ability to divide in vitro as long the appropriate culture conditions are maintained. In an embodiment, the cells are a continuous cell line that divides indefinitely. In some embodiments, immortalization of a cell can result in a secondary cell. In other embodiments, the immortalized cells can grow and divide indefinitely. Methods for immortalizing cells in culture are known. See, for example, Culture of Immortalized Cells, Freshney and Freshney Eds., Wiley Publishing Inc, Indianapolis, Ind., 1996 and Hahn, W C, 2002, Mol. Cells, 13:351-361. The methods include, but are not limited to, chemical mutagenesis, transforming cells with a vector comprising a polynucleotide that inactivates tumor suppressor genes in the transformed cells that results in a replicative senescent state or a polynucleotide that regulates the expression or activity of telomerase.

[0053] The term “full length genome” refers to a complete coding sequence of a viral genome that comprises at least 75% or greater of the nucleotide sequence that forms the hairpin of the ITR at the 5′ end and 3′ end of the genome.

[0054] The term “infection” as used herein refers to the attachment of B19 virus to the cellular surface of a host cell and penetrating the cells as to allow introduction of B19 viral DNA into a cell. Cells are typically infected by contacting a cell with B19 virus. Attachment of viral particles is typically facilitated by binding to a receptor on the cellular surface. Infection of a cell by B19 virus may be determined by analyzing the cell for viral RNA, viral DNA or viral protein production. Infection of a cell by 1319 virus may be determined by detecting viral transcripts, including, but not limited to, capsid protein transcripts (VP1 or VP2) and nonstructural protein (NS) transcripts. Infection of a cell by B19 virus may be determined by detection of viral proteins including but not limited to capsid proteins (VP1 or VP2) and nonstructural proteins (NS).

[0055] The term “infectious virus” as used herein refers to the ability of a virus to infect a cell. Infectious virus has the ability to interact with a cell to release the viral contents comprising of DNA, RNA and/or viral proteins into the host cell.

[0056] The term “immunogenic effective amount” of a parvovirus B19 or component of a parvovirus refers to an amount of a parvovirus B19 or component thereof that induces an immune response in an animal. The immune response may be determined by measuring a T or B cell response. Typically, the induction of an immune response is determined by the detection of antibodies specific for parvovirus B19 or component thereof.

[0057] The term “permissive cells” refers to cells that are susceptible to infection by B19. A permissive cell has appropriate receptors on its cell surface permitting viral attachment, interactions, and entry. A permissive cell infected with B19 may or may not produce infectious virus particles. In some embodiments, permissive cells are eukaryotic cells.

[0058] Examples of permissive cells include, but are not limited to primary erythroid progenitor cells from bone marrow, blood, or fetal liver, megakaryoblast cells, UT7/Epo cells, UT7/Epo-S1 cells, KU812Ep6 cells, JK-1 cells, MB-02 cells, as well as the cells described herein.

[0059] “Percent (%) nucleic acid sequence identity” with respect to the nucleic acid sequences identified herein is defined as the percentage of nucleotides in a candidate sequence that are identical with the nucleotides in a reference B19 nucleic acid sequence, after aligning the sequences and introducing gaps, if necessary, to achieve the maximum percent sequence identity. In some embodiments, the reference B19 nucleic acid sequence is that of SEQ ID NO:307 (Table 1) or that of SEQ ID NO:308 (Table 2).

TABLE 1

| | |
|---|---|
| 1 | aaatcaga tgccgccggt cgccgccggt aggcgggact tccggtacaa gatggcggac |
| 59 | aattacgtca tttcctgtga cgtcatttcc tgtgacgtca cttccggtgg gcgggacttc |
| 119 | cggaattagg gttggctctg ggccagcttg cttggggttg ccttgacact aagacaagcg |
| 179 | gcgcgccgct tgatcttagt ggcacgtcaa ccccaagcgc tggcccagag ccaaccctaa |
| 239 | ttccggaagt cccgcccacc ggaagtgacg tcacaggaaa tgacgtcaca ggaaatgacg |
| 299 | taattgtccg ccatcttgta ccggaagtcc cgcctaccgg cggcgaccgg cggcatctga |
| 359 | tttggtgtct tcttttaaat tttagcgggc ttttttcccg ccttatgcaa atgggcagcc |
| 419 | attttaagtg ttttactata attttattgg tcagttttgt aacggttaaa atgggcggag |
| 479 | cgtaggcggg gactacagta tatatagcac agcactgccg cagctctttc tttctgggct |
| 539 | gctttttcct ggactttctt gctgtttttt gtgagctaac taacaggtat ttatactact |
| 599 | tgttaatata ctaacatgga gctatttaga ggggtgcttc aagtttcttc taatgttctg |
| 659 | gactgtgcta acgataactg gtggtgctct ttactagatt tagacacttc tgactgggaa |
| 719 | ccactaactc atactaacag actaatggca atatacttaa gcagtgtggc ttctaagctt |
| 779 | gaccttaccg gggggccact agcagggtgc ttgtactttt ttcaagcaga atgtaacaaa |
| 839 | tttgaagaag gctatcatat tcatgtggtt attggggggc cagggttaaa ccccagaaac |
| 899 | ctcacagtgt gtgtagaggg gttatttaat aatgtacttt atcactttgt aactgaaaat |
| 959 | gtgaagctaa aatttttgcc aggaatgact acaaaaggca aatactttag agatggagag |
| 1019 | cagtttatag aaaactattt aatgaaaaaa atacctttaa atgttgtatg gtgtgttact |
| 1079 | aatattgatg gatatataga tacctgtatt tctgctactt ttagaagggg agcttgccat |
| 1139 | gccaagaaac cccgcattac cacagccata aatgatacta gtagcgatgc tggggagtct |
| 1199 | agcggcacag gggcagaggt tgtgccattt aatgggaagg gaactaaggc tagcataaag |
| 1259 | tttcaaacta tggtaaactg gttgtgtgaa aacagagtgt ttacagagga taagtggaaa |
| 1319 | ctagttgact ttaaccagta cactttacta agcagtagtc acagtggaag ttttcaaatt |
| 1379 | caaagtgcac taaaactagc aatttataaa gcaactaatt tagtgcctac tagcacattt |
| 1439 | ttattgcata cagactttga gcaggttatg tgtattaaag acaataaaat tgttaaattg |
| 1499 | ttactttgtc aaaactatga ccccctattg gtggggcagc atgtgttaaa gtggattgat |
| 1559 | aaaaaatgtg gcaagaaaaa tacactgtgg ttttatgggc cgccaagtac aggaaaaaca |
| 1619 | aacttggcaa tggccattgc taaaagtgtt ccagtatatg gcatggttaa ctggaataat |
| 1679 | gaaaactttc catttaatga tgtagcagga aaaagcttgg tggtctggga tgaaggtatt |
| 1739 | attaagtcta caattgtaga agctgcaaaa gccattttag gcgggcaacc caccagggta |
| 1799 | gatcaaaaaa tgcgtggaag tgtagctgtg cctggagtac ctgtggttat aaccagcaat |
| 1859 | ggtgacatta cttttgttgt aagcgggaac actacaacaa ctgtacatgc taaagcctta |
| 1919 | aaagagcgca tggtaaagtt aaactttact gtaagatgca gccctgacat ggggttacta |
| 1979 | acagaggctg atgtacaaca gtggcttaca tggtgtaatg cacaaagctg ggaccactat |
| 2039 | gaaaactggg caataaacta cacttttgat ttccctggaa ttaatgcaga tgccctccac |
| 2099 | ccagacctcc aaaccacccc aattgtcaca gacaccagta tcagcagcag tggtggtgaa |
| 2159 | agctctgaag aactcagtga aagcagcttt tttaacctca tcaccccagg cgcctggaac |
| 2219 | actgaaaccc cgcgctctag tacgcccatc cccgggacca gttcaggaga atcatttgtc |
| 2279 | ggaagcccag tttcctccga agttgtagct gcatcgtggg aagaagcctt ctacacacct |
| 2339 | ttggcagacc agtttcgtga actgttagtt ggggttgatt atgtgtggga cggtgtaagg |
| 2399 | ggtttacctg tgtgttgtgt gcaacatatt aacaatagtg ggggaggctt gggactttgt |
| 2459 | ccccattgca ttaatgtagg ggcttggtat aatggatgga aatttcgaga atttacccca |
| 2519 | gatttggtgc gatgtagctg ccatgtggga gcttctaatc ccttttctgt gctaacctgc |
| 2579 | aaaaaatgtg cttacctgtc tggattgcaa agctttgtag attatgagta aagaaagtgg |
| 2639 | caaatggtgg gaaagtgatg atgaatttgc taaagctgtg tatcagcaat ttgtggaatt |
| 2699 | ttatgaaaag gttactggaa cagacttaga gcttattcaa atattaaaag atcattataa |
| 2759 | tatttcttta gataatcccc tagaaaaccc atcctctctg tttgacttag ttgctcgcat |
| 2819 | taaaaataac cttaaaaatt ctccagactt atatagtcat cattttcaaa gtcatggaca |
| 2879 | gttatctgac cacccccatg ccttatcatc cagtagcagt catgcagaac ctagaggaga |
| 2939 | agatgcagta ttatctagtg aagacttaca caagcctggg caagttagcg tacaactacc |
| 2999 | cggtactaac tatgttgggc ctggcaatga gctacaagct gggcccccgc aaagtgctgt |
| 3059 | tgacagtgct gcaaggattc atgactttag gtatagccaa ctggctaagt tgggaataaa |
| 3119 | tccatatact cattggactg tagcagatga agagctttta aaaaatataa aaaatgaaac |
| 3179 | tgggtttcaa gcacaagtag taaaagacta ctttacttta aaaggtgcag ctgcccctgt |
| 3239 | ggcccatttt caaggaagtt tgccggaagt tcccgcttac aacgcctcag aaaaataccc |
| 3299 | aagcatgact tcagttaatt ctgcagaagc cagcactggt gcaggagggg ggggcagtaa |
| 3359 | tcctgtcaaa agcatgtgga gtgagggggc cacttttagt gccaactctg tgacttgtac |
| 3419 | attttctaga cagtttttaa ttccatatga cccagagcac cattataagg tgttttctcc |
| 3479 | cgcagcaagt agctgccaca atgccagtgg aaaggaggca aaggtttgca ccattagtcc |
| 3539 | cataatggga tactcaaccc catggagata tttagatttt aatgctttaa acttattttt |
| 3599 | ttcaccttta gagtttcagc acttaattga aaattatgga agtatagctc ctgatgcttt |
| 3659 | aactgtaacc atatcagaaa ttgctgttaa ggatgttaca gacaaaactg gagggggggt |
| 3719 | gcaggttact gacagcacta cagggcgcct atgcatgtta gtagaccatg aatacaagta |
| 3779 | cccatatgtg ttagggcaag gtcaagatac tttagcccca gaacttccta tttgggtata |
| 3839 | ctttccccct caatatgctt acttaacagt aggagatgtt aacacacaag gaatttctgg |
| 3899 | agacagcaaa aaattagcaa gtgaagaatc agcattttat gttttggaac acagttcttt |
| 3959 | tcagctttta ggtacaggag gtacagcaac tatgtcttat aagtttcctc cagtgccccc |
| 4019 | agaaaattta gagggctgca gtcaacactt ttatgagatg tacaatccct tatacggatc |
| 4079 | ccgcttaggg gttcctgaca cattaggagg tgacccaaaa tttagatctt taacacatga |
| 4139 | agaccatgca attcagcccc aaaacttcat gccagggcca ctagtaaact cagtgtctac |
| 4199 | aaaggaggga gacagctcta atactggagc tgggaaagcc ttaacaggcc ttagcacagg |
| 4259 | tacctctcaa aacactagaa tatccttacg cccggggcca gtgtctcagc cgtaccacca |
| 4319 | ctgggacaca gataaatatg tcacaggaat aaatgctatt tctcatggtc agaccactta |
| 4379 | tggtaacgct gaagacaaag agtatcagca aggagtgggt agatttccaa atgaaaaaga |
| 4439 | acagctaaaa cagttacagg gtttaaacat gcacacctac tttcccaata aaggaaccca |
| 4499 | gcaatataca gatcaaattg agcgccccct aatggtgggt tctgtatgga acagaagagc |
| 4559 | ccttcactat gaaagccagc tgtggagtaa aattccaaat ttagatgaca gttttaaaac |
| 4619 | tcagtttgca gccttaggag gatggggttt gcatcagcca cctcctcaaa tatttttaaa |
| 4679 | aatattacca caaagtgggc caattggagg tattaaatca atgggaatta ctaccttagt |
| 4739 | tcagtatgcc gtgggaatta tgacagtaac catgacattt aaattggggc cccgtaaagc |
| 4799 | tacgggacgg tggaatcctc aacctggagt atatcccccg cacgcagcag gtcatttacc |
| 4859 | atatgtacta tatgacccta cagctacaga tgcaaaacaa caccacagac atggatatga |
| 4919 | aaagcctgaa gaattgtgga cagccaaaag ccgtgtgcac ccattgtaaa cactccccac |
| 4979 | cgtgccctca gccaggatgc gtaactaaac gcccaccagt accacccaga ctgtacctgc |
| 5039 | cccctcctat acctataaga cagcctaaca caaaagatat agacaatgta gaatttaagt |
| 5099 | atttaaccag atatgaacaa catgttatta gaatgttaag attgtgtaat atgtatcaaa |
| 5159 | atttagaaaa ataaacgttt gttgtggtta aaaaattatg ttgttgcgct ttaaaaattt |
| 5219 | aaaagaagac accaaatcag atgccgccgg tcgccgccgg taggcgggac ttccggtaca |
| 5279 | agatggcgga caattacgtc atttcctgtg acgtcatttc ctgtgacgtc acttccggtg |
| 5339 | ggcggaactt ccggaattag ggttggctct gggccagcgc ttggggttga cgtgccacta |
| 5399 | agatcaagcg gcgcgccgct tgtcttagtg tcaaggcaac cccaagcaag ctggcccaga |
| 5459 | gccaacccta attccggaag tcccgcccac cggaagtgac gtcacaggaa atgacgtcac |
| 5519 | aggaaatgac gtaattgtcc gccatcttgt accggaagtc ccgcctaccg gcggcgaccg |
| 5579 | gcggcatctg attt |

TABLE 2

| | |
|---|---|
| 1 | gaattccgcc aaatcagatg ccgccggtag ccgccggtag gcgggacttc cggtacaaga |
| 61 | tggcggacaa ttacgtcatt tcctgtgacg tcatttcctg tgacgtcaca ggaaatgacg |
| 121 | taattgtccg ccatcttgta ccggaagtcc cgcctaccgg cggcgaccgg cggcatctga |
| 181 | tttggtgtct tcttttaaat tttagcgggc ttttttcccg ccttatgcaa atgggcagcc |
| 241 | attttaagtg ttttactata attttattgg ttagttttgt aacggttaaa atgggcggag |
| 301 | cgtaggcggg gactacagta tatatagcac ggtactgccg cagctctttc tttctgggct |
| 361 | gctttttcct ggactttctt gctgtttttt gtgagctaac taacaggtat ttatactact |
| 421 | tgttaacatc ctaacatgga gctatttaga ggggtgcttc aagtttcttc taatgttcta |
| 481 | gactgtgcta acgataactg gtggtgctct ttactggatt tagacacttc tgactgggaa |
| 541 | ccactaactc atactaacag actaatggca atatacttaa gcagtgtggc ttctaagctt |
| 601 | gactttaccg gggggccact agcagggtgc ttgtactttt ttcaagtaga atgtaacaaa |
| 661 | tttgaagaag gctatcatat tcatgtggtt actggggggc cagggttaaa ccccagaaac |
| 721 | cttacagtgt gtgtagaggg gttatttaat aatgtacttt atcaccttgt aactgaaaat |
| 781 | gtgaagctaa aatttttgcc aggaatgact acaaaaggca aatactttag agatggagag |
| 841 | cagtttatag aaaactattt aatgaaaaaa atacctttaa atgttgtatg gtgtgttact |
| 901 | aatattgatg gatatataga tacctgtatt tctgctactt ttagaagggg agcttgccat |
| 961 | gccaagaaac cccgcattac cacagccata aatgatacta gtagtgatgc tggggagtct |
| 1021 | agcggcacag gggcagaggt tgtgccattt aatgggaagg gaactaaggc tagcataaag |
| 1081 | tttcaaacta tggtaaactg gttgtgtgaa aacagagtgt ttacagagga taagtggaaa |
| 1141 | ctagttgact ttaaccagta cactttacta agcagtagtc acagtggaag ttttcaaatt |
| 1201 | caaagtgcac taaaactagc aatttataaa gcaactaatt tagtgcctac tagcacattt |
| 1261 | ttattgcata cagactttga gcaggttatg tgtattaaag acaataaaat tgttaaattg |
| 1321 | ttactttgtc aaaactatga ccccctattg gtggggcagc atgtgttaaa gtggattgat |
| 1381 | aaaaaatgtg gtaagaaaaa tacactgtgg ttttatgggc cgccaagtac aggaaaaaca |
| 1441 | aacttggcaa tggccattgc taaaagtgtt ccagtatatg gcatggttaa ctggaataat |
| 1501 | gaaaactttc catttaatga tgtagcagga aaaagcttgg tggtctggga tgaaggtatt |
| 1561 | attaagtcta caattgtaga agctgcaaaa gccattttag gcgggcaacc caccagggta |
| 1621 | gatcaaaaaa tgcgtggaag tgtagctgtg cctggagtac ctgtggttat aaccagcaat |
| 1681 | ggtgacatta cttttgttgt aagcgggaac actacaacaa ctgtacatgc taaagcctta |
| 1741 | aaagagcgca tggtaaagtt aaactttact gtaagatgca gccctgacat ggggttacta |
| 1801 | acagaggctg atgtadaaca gtggcttaca tggtgtaatg cacaaagctg ggaccactat |
| 1861 | gaaaactggg caataaacta cacttttgat ttccctggaa ttaatgcaga tgccctccac |
| 1921 | ccagacctcc aaaccacccc aattgtcaca gacaccagta tcagcagcag tggtggtgaa |
| 1981 | agctctgaag aactcagtga aagcagcttt tttaacctca tcaccccagg cgcctggaac |
| 2041 | actgaaaccc cgcgctctag tacgcccatc cccgggacca gttcaggaga atcatttgtc |
| 2101 | ggaagcccag tttcctccga agttgtagct gcatcgtggg aagaagcctt ctacacacct |
| 2161 | ttggcagacc agtttcgtga actgttagtt ggggttgatt atgtgtggga cggtgtaagg |
| 2221 | ggtttacctg tgtgttgtgt gcaacatatt aacaatagtg ggggagggtt gggactttgt |
| 2281 | ccccattgca ttaatgtagg ggcttggtat aatggatgga aatttcgaga atttacccca |
| 2341 | gatttggtgc gatgtagctg ccatgtggga gcttctaatc ccttttctgt gctaacctgc |
| 2401 | aaaaaatgtg cttacctgtc tggattgcaa agctttgtag attatgagta aaaaaagtgg |
| 2461 | caaatggtgg gaaagtgatg ataaatttgc taaagctgtg tatcagcaat ttgtggaatt |
| 2521 | ttatgaaaag gttactggaa cagacttaga gcttattcaa atattaaaag atcattataa |
| 2581 | tatttcttta gataatcccc tagaaaaccc atcctctctg tttgacttag ttgctcgtat |
| 2641 | taaaaataac cttaaaaact ctccagactt atatagtcat cattttcaaa gtcatggaca |
| 2701 | gttatctgac cacccccatg ccttatcatc cagtagcagt catgcagaac ctagaggaga |
| 2761 | aaatgcagta ttatctagtg aagacttaca caagcctggg caagttagcg tacaactacc |
| 2821 | cggtactaac tatgttgggc ctggcaatga gctacaagct gggcccccgc aaagtgctgt |
| 2881 | tgacagtgct gcaaggattc atgactttag gtatagccaa ctggctaagt tgggaataaa |
| 2941 | tccatatact cattggactg tagcagatga agagctttta aaaaatataa aaaatgaaac |
| 3001 | tgggtttcaa gcacaagtag taaaagacta ctttacttta aaaggtgcag ctgcccctgt |
| 3061 | ggcccatttt caaggaagtt tgccggaagt tcccgcttac aacgcctcag aaaaataccc |
| 3121 | aagcatgact tcagttaatt ctgcagaagc cagcactggt gcaggagggg ggggcagtaa |
| 3181 | ttctgtcaaa agcatgtgga gtgagggggc cacttttagt gctaactctg taacttgtac |
| 3241 | attttccaga cagtttttaa ttccatatga cccagagcac cattataagg tgttttctcc |
| 3301 | cgcagcgagt agctgccaca atgccagtgg aaaggaggca aaggtttgca ccatcagtcc |
| 3361 | cataatggga tactcaaccc catggagata tttagatttt aatgctttaa atttattttt |
| 3421 | ttcaccttta gagtttcagc acttaattga aaattatgga agtatagctc ctgatgcttt |
| 3481 | aactgtaacc atatcagaaa ttgctgttaa ggatgttaca gacaaaactg gagggggggt |
| 3541 | acaggttact gacagcacta cagggcgcct atgcatgtta gtagaccatg aatacaagta |
| 3601 | cccatatgtg ttagggcaag gtcaggatac tttagcccca gaacttccta tttgggtata |
| 3661 | ctttccccct caatatgctt acttaacagt aggagatgtt aacacacaag gaatttctgg |
| 3721 | agacagcaaa aaattagcaa gtgaagaatc agcattttat gttttggaac acagttcttt |
| 3781 | tcagctttta ggtacaggag gtacagcatc tatgtcttat aagtttcctc cagtgccccc |
| 3841 | agaaaattta gagggctgca gtcaacactt ttatgaaatg tacaatccct tatacggatc |
| 3901 | ccgcttaggg gttcctgaca cattaggagg tgacccaaaa tttagatctt taacacatga |
| 3961 | agaccatgca attcagcccc aaaacttcat gccagggcca ctagtaaact cagtgtctac |
| 4021 | aaaggaggga gacagctcta atactggagc tggaaaagcc ttaacaggcc ttagcacagg |
| 4081 | tacctctcaa aacactagaa tatccttacg ccctgggcca gtgtctcagc cataccacca |
| 4141 | ctgggacaca gataaatatg tcacaggaat aaatgccatt tctcatggtc agaccactta |
| 4201 | tggtaacgct gaagacaaag agtatcagca aggagtgggt agatttccaa atgaaaaaga |
| 4261 | acagctaaaa cagttacagg gtttaaacat gcacacctac tttcccaata aaggaaccca |
| 4321 | gcaatataca gatcaaattg agcgccccct aatggtgggt tctgtatgga acagaagagc |
| 4381 | ccttcactat gaaagccagc tgtggagtaa aattccaaat ttagatgaca gttttaaaac |
| 4441 | tcagtttgca gccttaggag gatggggttt gcatcagcca cctcctcaaa tatttttaaa |
| 4501 | aatattacca caaagtgggc caattggagg tattaaatca atgggaatta ctaccttagt |
| 4561 | tcagtatgcc gtgggaatta tgacagtaac tatgacattt aaattggggc cccgtaaagc |
| 4621 | tacgggacgg tggaatcctc aacctggagt atatcccccg cacgcagcag gtcatttacc |
| 4681 | atatgtacta tatgacccca cagctacaga tgcaaaacaa caccacagac atggatatga |
| 4741 | aaagcctgaa gaattgtgga cagccaaaag ccgtgtgcac ccattgtaaa cactccccac |
| 4801 | cgtgccctca gccaggatgc gtaactaaac gcccaccagt accacccaga ctgtacctgc |
| 4861 | cccctcctgt acctataaga cagcctaaca caaaagatat agacaatgta gaatttaagt |
| 4921 | acttaaccag atatgaacaa catgttatta gaatgttaag attgtgtaat atgtatcaaa |
| 4981 | atttagaaaa ataaacattt gttgtggtta aaaaattatg ttgttgcgct ttaaaaattt |
| 5041 | aaaagaagac accaaatcag atgccgccgg tcggccggta ggcgggactt ccggtacaag |
| 5101 | atggcggaat tc |

[0060] Alignment for purposes of determining percent nucleic acid sequence identity can be achieved in various ways that are within the skill in the art, for instance, using publicly available computer software such as BLAST, BLAST-2, ALIGN, or Megalign (DNASTAR) software. Those skilled in the art can determine appropriate parameters for measuring alignment, including any algorithms needed to achieve maximal alignment over the full-length of the sequences being compared.

[0061] For purposes herein, the % nucleic acid sequence identity of a given nucleic acid sequence A to, with, or against a given nucleic acid sequence B (which can alternatively be phrased as a given nucleic acid sequence A that has or comprises a certain % nucleic acid sequence identity to, with, or against a given nucleic acid sequence B) is calculated as follows:

100 times the fraction W/Z

where W is the number of nucleotides scored as identical matches by the sequence alignment program in that program's alignment of A and B, and where Z is the total number of nucleotides in B. It will be appreciated that where the length of nucleic acid sequence A is not equal to the length of nucleic acid sequence B, the % nucleic acid sequence identity of A to B will not equal the % nucleic acid sequence identity of B to A.

[0062] The term “primary cell” as used herein refers to a cell obtained from a primary source such as a tissue or blood sample from an organism, preferably an animal. In an embodiment, the animal is a human.

[0063] “Recombinant” refers to a polynucleotide or polypeptide encoded by a polypeptide that has been isolated and/or altered by the hand of man or a B19 clone encoded by such a polynucleotide. A DNA sequence encoding all or a portion of a B19 viral genome may be isolated and combined with other control sequences in a vector. The other control sequences may be those that are found in the naturally occurring gene or others. The vector provides for introduction into host cells and amplification of the polynucleotide. The vectors described herein for B19 clones are introduced into cells and cultured under suitable conditions as known to those of skill in the art. Preferably, the host cell is a bacterial cell or a permissive cell.

[0064] The term “transformation” as used herein refers to introducing exogenous DNA into a bacterial cell so that the DNA is replicable or into a eukaryotic cell, either as an extrachromosomal element or by chromosomal integration. The introduced DNA is transcribed and expressed by the cell. Depending on the host cell used, transformation is done using standard techniques appropriate to such cells. Methods for transformation include, but are not limited to, electroporation, viral vectors, liposomal vectors, gene gun, microinjection and transforming viruses.

[0065] The term “transfection” as used herein refers to introducing exogenous DNA into a eukaryotic cell so that the DNA is replicable, either as an extrachromosomal element or by chromosomal integration. Depending on the host cell used, transfection is done using standard techniques appropriate to such cells. Methods for transfecting eukaryotic cells include polyethyleneglycol/DMSO, liposomes, electroporation, and electrical nuclear transport.

[0066] The term “transfection efficiency” as used herein means the percentage of total cells contacted with a nucleic acid, such as a plasmid, that take up one or more copies of the plasmid. Transfection efficiency can also be expressed as the total number of cells that take up one or more copies of the plasmid per μg of plasmid. If the plasmid contains a reporter gene, transfection efficiency of cells can also be expressed in units of expression of the reporter gene per cell.

[0067] The term “replicable vector,” as used herein, is intended to refer to a nucleic acid molecule capable of transporting another nucleic acid to which it has been linked into a cell and providing for amplification of the nucleic acid. One type of vector is a “plasmid”, which refers to a circular double stranded DNA loop into which additional DNA segments may be ligated. Another type of vector is a phage vector. Another type of vector is a viral vector, wherein additional DNA segments may be ligated into the viral genome. Certain vectors are capable of autonomous replication in a host cell into which they are introduced (e.g., bacterial vectors having a bacterial origin of replication and episomal mammalian vectors). Other vectors (e.g., non-episomal mammalian vectors) can be integrated into the genome of a host cell upon introduction into the host cell, and thereby are replicated along with the host genome. In the present specification, “plasmid” and “vector” may be used interchangeably as the plasmid is the most commonly used form of vector. In some embodiments, the vector is a vector that can replicate to high copy number in a cell.

[0068] The term “viral vector” or “recombinant viral vector” as used herein refer to a virus that has been genetically altered such that a nucleic acid sequence has been integrated to the viral genome whereby the virus serves as a vector to introduce the integrated nucleic acid sequence into a host cell. Examples of viral vectors are adenoviral vectors, adeno-associated viral vectors (AAV), lentiviral vectors and retroviral vectors.

[0069] “ITR” or “ITR sequence” refers to an inverted terminal repeat of nucleotides in a nucleic acid such as a viral genome. The ITRs include an imperfect palindrome that allows for the formation of a double stranded hairpin with some areas of mismatch that form bubbles. The ITRs serve as a primer for viral replication and contain a recognition site for NS protein that may be required for viral replication and assembling. In some embodiments, the location and number of the bubbles or areas of mismatch are conserved as well as the NS binding site. The NS binding site provides for cleavage and replication of the viral genome.

### II. Methods and Cells Permissive for B19 Virus Infection

[0070] Parvovirus B19 (B19) may infect permissive cells but the amount of infectious virus produced in these cells may be very small. Cells and methods for consistently producing B19 in useful quantities in cell culture are limited. Utilizing the methods of the disclosure, cells that produce useful quantities of B19 were, isolated and in some embodiments, immortalized.

[0071] B19 produced by the cells and methods of the invention can be utilized in a variety of assays and to develop therapeutic products. An in vitro system for producing infectious virus particles can be used in screening methods to diagnose disease and/or to identify agents, such as antibodies or antisense molecules that can inhibit viral infectivity or reproduction. Infectious virus produced by the cells and methods of the invention and/or infectious virus in a host cell of the invention can be utilized to form immunogenic compositions to prepare therapeutic antibodies or vaccine components. The ability to produce significant amounts of infectious virus in vitro is also useful to develop attenuated strains of the virus that may be utilized in vaccines.

[0072] Biomarkers of B19 infected cells can also be useful to identify parvovirus infected cells. Methods of detecting expression or activity of differentially expressed genes in virus infected cells are provided herein.

[0073] A. Methods for Producing Parvovirus B19 in CD36+ Erythroid Progenitor Cells.

[0074] The disclosure provides methods for producing parvovirus B19 in CD36⁺ erythroid progenitor cells. In some embodiments, the CD36⁺ cells are also CD34⁻ and/or CD133⁻. In some embodiments, a method is directed to producing B19 viral genomes, virus particles, viral transcripts, and/or clones. The methods of the disclosure comprise introducing parvovirus B19 genomes into erythroid progenitor cells. In an embodiment, the CD36⁺ erythroid progenitor cells are non-enucleated, globoside positive, and optionally, comprise hemoglobin in a subset of the cell population. In some embodiments, the erythroid progenitor cell population has about the same percentage of cells that are CD36⁺ and globoside. In some embodiments, the population has at least 25 to 60% of the cells positive for globoside and CD36. In some embodiments, the population has at least 60% of the cells positive for globoside and CD36 and at least 50% cells positive for glycophorin (CD235a). In some embodiments, at least 25% to 100% of the erythroid progenitor cells are CD36+ and globoside+cells, and less than 70% of the cell population are CD33⁺.

[0075] In an embodiment, the CD36⁺ erythroid progenitor cells are CD34⁻, CD44⁺, CD235a⁺, CD19⁻, and CD3⁻. In an embodiment, the CD36⁺ erythroid progenitor cells are CD36⁺, CD44⁺, CD235a⁺, CD34⁻, CD19⁻, CD10⁻, CD4⁻, CD3⁻, and CD2.

### Cells

[0076] The erythroid progenitor cells can be produced from hematopoietic stem cells. The hematopoietic stem cells can be pluripotent or lineage restricted. In some embodiments, the hematopoietic stem cells are isolated from bone marrow, peripheral blood, embryonic tissue, fetal tissue, or umbilical cord blood. Methods for isolating stem cells are known and include, for example, magnetic cell sorting, microbead selection, and ficoll density gradient separation. In an embodiment, the stem cells are CD34⁺ hematopoietic stem cells. In an embodiment, the stem cells are CD133⁺ hematopoietic stem cells. In an embodiment, the stem cells are CD133⁺ and CD34⁺ hematopoietic stem cells. Other marker as described herein may be also be used to select or characterize the hematopoietic stem cells.

[0077] When a population of cells is enriched for CD34+, CD133+, or both only a subset of the cells are hematopoietic stem cells. The CD34⁺, CD133+, or cells with both are a mixture of hematopoietic stem cells and cells that are in the process of differentiating, which includes myeloid lineage and lymphoid lineage pluripotent stem cells and myeloid lineage restricted and lymphoid lineage restricted stem cells. Enriching for CD34+, CD133+, or both positive cells results in a mixture of hematopoietic stem cells and precursor cells such as pluripotent stem cells, lymphoid precursor cells and various myeloid lineage restricted stem cells that can differentiate into CD36⁺ erythroid progenitor cells. Cells selected for CD34+ or CD133+ enrich for the same subpopulation of hematopoietic stem cells.

[0078] Kits for isolating CD34⁺ or CD133⁺ cells are commercially available, for example, from Miltenyi Biotech (Auburn, Calif.). In an embodiment, CD34⁺ stem cells are isolated by magnetic microbead selection (Giarrantana et al., 2005, Nature Biotech., 23:69-74; Freyssinier et al., 1999, Brit. J. Haemotol., 106:912-922). In an embodiment, the pluripotent stem cells are myeloid precursor cells (CFU-S). In an embodiment, the lineage restricted stem cells are BFU-E or CFU-E. In an embodiment, CD133⁺ stem cells are isolated by magnetic microbead selection using kits for isolating CD133⁺ cells commercially available, for example, from Miltenyi Biotech (Auburn, Calif.).

[0079] Methods for generating and amplifying a population of human erythroid progenitor cells from hematopoietic stem cells are known. See, for example, Giarrantana et al., 2005, Nature Biotech., 23:69-74 and Freyssinier et al., 1999, Brit. J. Haemotol., 106:912-922. In an embodiment, the CD36⁺ erythroid progenitor cells are produced from CD34⁺ hematopoietic stem cells isolated from G-CSF mobilized peripheral blood stem cells. The CD34⁺ hematopoietic stem cells can be frozen cells that have been thawed or freshly isolated cells. In an embodiment, the CD36⁺ erythroid progenitor cells are produced from CD133⁺ hematopoietic stem cells isolated from G-CSF mobilized peripheral blood stem cells.

[0080] In an embodiment, the hematopoietic stem cells are cultured at an initial density of about 10⁴ cells/mL to about 1 to 100×10⁵ cells in expansion media under conditions that allow for expansion and differentiation of the cells, diluted 1:5 in expansion media and the diluted cells are cultured in expansion media under conditions that allow for expansion and differentiation. In an embodiment, the hematopoeitic stem cells are cultured at an initial density of about 10⁴ cells/mL to about 1 to 100×10⁵ cells in expansion media under conditions that allow for expansion and differentiation of the cells and can be frozen and thawed for further expansion and differentiation. In an embodiment, the hematopoietic stem cells are cultured at an initial density of about 10⁴ cells/mL and allowed to grow for at least 4 to 20 days in expansion media under conditions that allow for expansion and differentiation of the cells and can be frozen and thawed for further expansion and differentiation.

[0081] CD36 is used as a marker for erythroid progenitor cells. CD19, CD3, and CD2 are cell surface markers for lymphocytes, and erythroid progenitor cells do not have these markers and as such can be used to distinguish these cells from lymphoid lineage cells. CD44 is a cell surface marker for leukocytes and erythrocytes. CD235a (glyophorin A) is found on erythroid progenitor cells. CD71 is a marker for the transferrin receptor. In an embodiment, the CD36⁺ erythroid progenitor cells are globoside+, CD36⁺, CD34⁻, CD19⁻, and CD3⁻. In an embodiment, the CD36⁺ erythroid progenitor cells are globoside+, CD36⁺, CD34⁻, CD19⁻, and CD3⁻. In an embodiment, the CD36⁺ erythroid progenitor cells are CD36⁺, CD44⁺, CD235a⁺, CD34⁻, CD19⁻, CD10⁻, CD4⁻, CD3⁻, and CDT.

[0082] In an embodiment, the CD36⁺ erythroid progenitor cells are non-enucleated, globoside positive, and optionally comprise hemoglobin. In an embodiment, the population of CD36⁺ erythroid progenitor cells comprises less than 70% CD33⁺ cells, and more preferably 80, 70, 60, 50, or 40% or any number % less than 70 of CD33⁺ cells. In some embodiments, at least 25% to 100% of the erythroid progenitor cells are CD36+ and globoside+cells, and less than 70% of the cell population are CD33+. In an embodiment, the population of CD36⁺ erythroid progenitor cells comprises 30% CD71⁺ cells, and more preferably 40, 50, 60, 70, 80, 90 or more or any number of % greater than 30% up to 100% of CD71⁺ cells. In some embodiments, the erythroid progenitor cell population has about the same percentage of cells that are CD36+ and globoside+. In some embodiments, the population has at least 25 to 100% of the cells positive for globoside and CD36. In some embodiments, the population has at least 60% of the cells positive for globoside and CD36 and at least 50% cells positive for glycophorin by day 8 in culture.

[0083] In another embodiment, the hemapoeitic stem cells are cultured for about at least 4 to 26 days in expansion media under conditions that allow for expansion and differentiation of the cells. The cells are cultured at a low concentration (˜10⁴ cells/mL) and then the culture volume is expanded in expansion media which allows for continued expansion and differentiation. In some embodiments, the cells are cultured for about 2-4 days, the culture volume expanded at least 2-5 fold in expansion medium for an additional 2-18 days.

[0084] In some embodiments, the culture comprises at least about 25 to 100% CD36⁺ cells, more preferably about 60%, 70%, 80%, 90%, 95%, 98% or 100% of CD36⁺ cells. The % of CD36⁺ cells can include any number from 25 to 100% of the cells are CD36⁺. The proportion of CD36⁺ cells in the population can be determined using standard methodologies, such as FACS analysis.

[0085] In some embodiments, the expansion media comprises stem cell factor (SCF), interleukin 3 (IL-3), and/or erythropoietin. The amounts of the growth factors and media components can be varied in accord with what is known in the art for culturing hematopoietic stem cells. In some embodiments, the expansion media comprises stem cell factor (SCF), interleukin 3 (IL-3), hydrocortisone, and/or erythropoietin. In some embodiments, the expansion media comprises bovine serum albumin (BSA), insulin, transferrin, ferrous sulfate, ferric nitrate, insulin, hydrocortisone, stein cell factor (SCF), interleukin 3 (IL-3), and/or erythropoietin. In an embodiment, the expansion media comprises about 10 mg/ml BSA, about 10 μg/ml recombinant human insulin, about 200 μg/ml human transferrin, about 900 ng/ml ferrous sulfate, about 90 ng/ml ferric nitrate, about 10⁻⁶ M hydrocortisone, about 5 ng/ml IL-3, about 100 ng/ml recombinant human SCF, and about 3 IU/ml recombinant human erythropoietin. In another embodiment, the expansion medium comprises BIT 9500 media (StemCell Tech. Inc., Vancouver, British Columbia) diluted 1:5 in AMEM (Mediatech Inc., Herndon, Va.) and supplemented with 10⁻⁶ M hydrocortisone, 5 ng/ml human IL-3, 100 ng/ml recombinant human stem cell factor, 3 IU/ml recombinant human erythropoietin, 900 ng/ml ferrous sulfate, and 90 ng/ml ferric nitrate and has a final concentration of 10 mg/ml deionized BSA, 10 μg/ml recombinant human insulin, and 200 μg/ml iron saturated human transferrin. Ranges of the concentration of the components in the expansion media can be varied as is known to those of skill in the art.

[0086] When the cells become CD36⁺, the cells are permissive for B19 virus replication. In an embodiment, at least some of the cells are actively dividing when infected. In some embodiments, B19 virus can be introduced into CD36⁺ cells after 1 day in culture to about 8 days after the cell culture has reached about 25% or greater CD36+ cells. In an embodiment, the cells are infected from day 8 to day 20 in culture. The cells may be transformed and/or immortalized as described herein, and then the B19 virus can be introduced at a later time point or can be cultured for a longer period of time post transformation.

[0087] B. Permissive Cells

[0088] The disclosure also provides erythroid progenitor cells that are permissive for B19 infection. The CD36⁺ erythroid progenitor cells of the invention can be produced from cells as described herein. In some embodiments, the CD36⁺ erythroid progenitor cells are CD36⁺ and CD34⁻. CD19, CD3, and CD2 are cell surface markers for lymphocytes cells and can be used to distinguish erythroid progenitor cells from lymphoid lineage cells. CD44 is a cell surface marker for leukocytes and erythrocytes. CD235a is a cell surface marker for glyophorin A typically found on erythroid cells. In some embodiments, the erythroid progenitor cell population has about the same percentage of cells that are CD36+ and globoside+. In some embodiments, the population has at least 25 to 60% of the cells positive for globoside and CD36. In some embodiments, at least 25% to 100% of the erythroid progenitor cells are CD36+ and globoside+cells, and less than 70% of the cell population are CD33+. In some embodiments, the population has at least 60% of the cells positive for globoside and CD36 and at least 50% cells positive for glycophorin.

[0089] In an embodiment, the CD36⁺ erythroid progenitor cells are CD36, CD34⁻, CD19⁻, and CD3⁻. In an embodiment, the CD36⁺ erythroid progenitor cells are CD36⁺, CD34⁻, CD133⁻, CD19⁻ and CD3′. In an embodiment, the CD36⁺ erythroid progenitor cells are CD36⁺, CD44⁺, CD235a⁺, CD34⁻, CD19⁻, CD10⁻, CD4⁻, CD3⁻, and CDT. In an embodiment, the CD36⁺ cells comprise hemoglobin and/or globoside.

[0090] In an embodiment, the CD36⁺ erythroid progenitor cells are BFU-E, CFU-E, proerythroblasts, or erythroblasts. In an embodiment, the CD36⁺ erythroid progenitor cells are non-enucleated and comprise hemoglobin and/or globoside. The CD36⁺ erythroid progenitor cells can be infected with B19 as described herein.

[0091] Replication of B19 in reported permissive cell lines is known to be limited. Examples of reported permissive cell lines include, but are not limited to, megakaryoblastoid cell lines such as UT7/Epo, UT7/Epo-S1, and MB-O2 and erythroleukemic cell lines such as KU812Ep6 and JK-1. Previous studies have indicated that UT7/Epo-S1 cells are the most permissive cells for B19 infection (Wong, et. al., 2006, Journal of Clinical Virology, 35:407-413). In some embodiments, replication of the B19 genome in the erythroid progenitor cells of the disclosure is greater than replication of the viral genome in UT7/Epo-S1 cells. In an embodiment, replication of B19 genome in the erythroid progenitor cells is at least 10 fold greater, at least 50 fold greater, at least 100 fold greater, at least 200 fold greater, at least 300 fold greater, at least 400 fold greater, or at least 500 fold greater than the replication of B19 genome in UT7/Epo-S1 cells. In some embodiments, production of B19 genome in the CD36⁺ erythroid progenitor cells of the invention is greater than production of B19 genome in UT7/Epo-S1 cells. In an embodiment, production of B19 genome in the CD36⁺ erythroid progenitor cells of the invention is at least 0.5 log, at least 1.0 log, at least 1.5 log, at least 2.0 log, or at least 2.5 log greater that the production of B19 genome in UT7/Epo-S1 cells.

[0092] In an embodiment, the CD36⁺ erythroid progenitor cells of the disclosure are secondary cells or immortalized cells. Methods for immortalizing cells in culture are known. See, for example, Culture of Immortalized Cells, Freshney and Freshney Eds., Wiley Publishing Inc, Indianapolis, Ind., 1996 and Hahn, W C, 2002, Mol. Cells, 13:351-361. Methods for immortalizing cells include, but are not limited to, transforming cells with a vector comprising a polynucleotide that inactivates tumor suppressor genes in the transformed cells that results in a replicative senescent state or a polynucleotide that regulates the expression or activity of telomerase. Examples of polynucleotides that inactivate tumor suppressor genes include, but are not limited to, simian virus (SV40) T antigen gene, adenovirus E1A or E1B gene, and human papillomavirus type 16 (HPV-16) E6 or E7 gene. One example of a polynucleotide that regulates expression or activity of telomerase is telomerase reverse transcriptase (TERT). TERT is commercially available, for example, from Geron Corp., Menlo Park, Calif. In other embodiments, Epstein Barr virus is used to immortalize the cells.

[0093] In an embodiment, the vector is a recombinant plasmid, a recombinant virus, or a retrovirus. In an embodiment, the viral vector is an adenoviral vector, lentiviral vector, AAV vector, Epstein Barr Virus, or retroviral vector. A eukaryotic expression plasmid containing human TERT cDNA is commercially available from American Type Culture Collection (Manassas, Va.: catalog number ATCC® MBA-141). Other viral vectors are commercially available.

[0094] In some embodiments, an erythroid progenitor cell is a secondary cell. In an embodiment, secondary cells are generated by transforming primary cells with a vector comprising a polynucleotide that inactivates tumor suppressor genes in the transformed cells that results in a replicative senescent state or a polynucleotide that regulates the expression or activity of telomerase or is Epstein Barr virus.

[0095] In another embodiment, secondary erythroid progenitor cells can also be generated by culturing primary cells under conditions that result in increased number of cell divisions or life span. In an embodiment, a secondary cell can divide at least 2 to about 100 times, more preferably about 2 to 50 times, more preferably 2 to 15. In an embodiment, a secondary cell can divide indefinitely. In an embodiment, the doubling time of the secondary cells is about 12 hours, about 16 hours, about 24 hours, about 30 hours, or about 36 hours.

[0096] The secondary erythroid progenitor cells are cultured in an appropriate growth medium that provides for increased number of generations. In some embodiments, the expansion media comprises stem cell factor (SCF), interleukin 3 (IL-3), and/or erythropoietin. The amounts of the growth factors may be varied as is known in the art. In some embodiments, the expansion media comprises stem cell factor (SCF), interleukin 3 (IL-3), hydrocortisone, and/or erythropoietin. In some embodiments, the expansion media comprises bovine serum albumin (BSA), insulin, transferrin, ferrous sulfate, ferric nitrate, insulin, hydrocortisone, stem cell factor (SCF), interleukin 3 (IL-3), and/or erythropoietin. In an embodiment, the expansion media comprises about 10 mg/ml BSA, about 10 μg/ml recombinant human insulin, about 200 μg/ml human transferrin, about 900 ng/ml ferrous sulfate, about 90 ng/ml ferric nitrate, about 10⁻⁶ M hydrocortisone, about 5 ng/ml (IL-3), about 100 ng/ml recombinant human SCF, and about 3 IU/ml recombinant human erythropoietin. In another embodiment, the expansion medium comprises BIT 9500 media (StemCell Tech. Inc., Vancouver, British Columbia) diluted 1:5 in AMEM (Mediatech Inc., Herndon, Va.) and supplemented with 10⁻⁶ M hydrocortisone, 5 ng/mL human IL-3, 100 ng/ml recombinant human stem cell factor, 3 IU/ml recombinant human erythropoietin, 900 ng/ml ferrous sulfate, and 90 ng/ml ferric nitrate and has a final concentration of 10 mg/ml deionized BSA, 10 μg/ml recombinant human insulin, and 200 μg/ml iron saturated human transferrin.

[0097] In some embodiments, the secondary erythroid progenitor cells can be cultured from about 1 to 15 days. In an embodiment, the secondary CD36⁺ erythroid progenitor cells of the invention have a life span of about 10 to about 30 days. In an embodiment, the secondary CD36⁺ erythroid progenitor cells of the invention have a life span of about 30 days to about 40 days, of about 40 days to about 50 days, of about 50 days to about 60 days, of about 60 days to 70 days, of about 70 days to about 80 days, of about 80 days to about 90 days, or of about 90 days to about 100 days. In an embodiment, the secondary CD36⁺ erythroid progenitor cells of the invention have a life span of at least 30 days, of at least 40 days, of at least 50 days, of at least 60 days, of at least 70 days, of at least 80 days, of at least 90 days, of at least 100 days, of at least 150 days, of at least 200 days, of at least 250 days, of at least 300 days, or of at least 350 days.

[0098] In an embodiment, the CD36⁺ erythroid progenitor cells of the invention can undergo at least 10 doublings, at least 20 doublings, at least 30 doubling, at least 40 doublings, at least 50 doublings, at least 60 doublings, at least 70 doublings, at least 80 doublings, at least 90 doublings, at least 100 doublings, at least 200 doublings, at least 300 doublings, at least 400 doublings, at least 500 doublings, at least 600 doublings, at least 700 doublings, at least 800 doublings, at least 900 doublings, at least 1000 doublings, at least 1500 doublings, at least 2000 doublings, at least 2500 doublings, at least 3000 doublings, at least 4000 doublings, at least 5000 doublings, or at least 10,000 doublings.

[0099] In an embodiment, the CD36⁺ erythroid progenitor cells of the invention are immortalized with a viral vector comprising a polynucleotide encoding SV40 large T-antigen. Viral vectors encoding SV40 large T-antigen are known. See, for example, Gluzman et al., 1980, Proc. Nall. Acad. Sci. U.S.A., 77:3898-3902. While not wishing to be bound by theory, it is believed that the SV40 large T antigen transforms the cells into tumor-like cells, which like cancer cells, grow rapidly and allow the cells to continue multiplying for an extended period of time. In an embodiment, the viral vector is an adenovirus, lentivirus, adeno-associated virus (AAV), or retrovirus. In an embodiment, the CD36⁺ erythroid progenitor cells of the invention are contacted with a viral vector when the population has at least 25% CD36+ cells. In some embodiments, at least 25% to 100% of the erythroid progenitor cells are CD36+ and globoside+cells, and less than 70% of the cell population are CD33+. In an embodiment, the CD36⁺ erythroid progenitor cells of the invention are contacted with a viral vector after 8 days in expansion media. The expansion media comprises cytokines and growth factors that induce the hemapoeitic stem cells to differentiate into the erythroid progenitor cells of the disclosure. In an embodiment, the expansion media comprises SCF, IL-3, and/or erythropoietin and/or hydrocortisone.

[0100] In an embodiment, immortalization of the CD36⁺ erythroid progenitor cells as described herein inhibits further differentiation of the cells. In an embodiment, immortalization of the erythroid progenitor cells as described herein maintains the cells as CD36⁺ erythroid progenitor cells and inhibits differentiation of the cells into erythrocytes. In a specific embodiment, the cells may be frozen after about 1 to about 6 passages and the frozen cells may be thawed and cultured. In an embodiment, immortalization of the erythroid progenitor cells maintains the cells as CD36⁺ erythroid progenitor cells and inhibits differentiation of the cells into erythrocytes even after one or more passages or plating the cells from frozen stocks subjected to one or more freeze/thaw cycles. In an embodiment, the immortalized CD36⁺ erythroid progenitor cells of the invention are BFU-E, CFU-E, proerythroblasts, or erythroblasts. In an embodiment, the immortalized CD36⁺ erythroid progenitor cells are BFU-E, CFU-E, proerythroblasts, or erythroblasts erythroid progenitors even after one or more passages or plating the cells from frozen stocks subjected to one or more freeze/thaw cycles.

[0101] The secondary or immortalized CD36⁺ erythroid progenitor cells of the disclosure maintain permissiveness for B19 infection. In an embodiment, the secondary or immortalized CD36⁺ erythroid progenitor cells of the invention maintain genetic stability and permissiveness for B19 infection after multiple passages. B19 virus can be introduced into the cells at any time, such as when the cells have reached about 25 to 100% CD36⁺ cells, more preferably about 70 to 100%, or even 90 to 100% CD36⁺. In an embodiment, the cells can be infected up to 13 days, up to 15 days, up to 20 days, up to 25 days, or up to 30 days. In an embodiment, the cells remain permissive for infection indefinitely.

[0102] In an embodiment, replication of B19 genome in the secondary or immortalized CD36⁺ erythroid progenitor cells of the invention is at least 100 to 1000 fold greater than the replication of B19 genome in UT7/Epo-S1 cells depending on the concentration of input virus. In some embodiments, production of B19 in the secondary or immortalized CD36⁺ erythroid progenitor cells of the invention is greater than production of B19 in UT7/Epo-S1 cells. In an embodiment, production of B19 in the secondary or immortalized CD36⁺ erythroid progenitor cells of the invention is at least 2 log to 3 logs greater that the production of B19 in UT7/Epo-S1 cells depending on the concentration of input virus.

[0103] C. B19 Virus

[0104] The erythroid progenitor cells as described herein can be infected by contacting the cells with B19 or introducing a vector comprising an infectious clone of B19 into the cells. B19 can be naturally occurring or a variant thereof. B19 viral DNA can be isolated from infected humans or cells as described, for example, in Wong, et. al., 2006, Journal of Clinical Virology, 35:407-413 or can be prepared as described, for example, in U.S. 20060008469 or Zhi et al., 2004, Virology, 318:142-152. Utilizing an infectious clone allows introduction of the viral genome into a cell without the need for entry mediated by viral proteins such as the capsid protein and/or the presence of globoside on the cell.

[0105] In some embodiments, the reference sequence may be human parvovirus B19-Au (GeneBank accession number M13178; SEQ ID NO:307), which lacks intact 1TRs at both 5′ and 3′ ends of the genome and the naturally occurring variants have at least 90% sequence identity to the reference sequence. In other cases, a variant may be prepared by altering or modifying the nucleic acid sequence of the viral genome including by addition, substitution, and deletion of nucleotides. In that case, the reference sequence can be that of parvovirus B19 comprising a polynucleotide sequence of SEQ ID NO:307. In some embodiments, a parvovirus genome has at least 90% sequence identity, more preferably at least 95%, or greater sequence identity to that of a parvovirus B19 genome comprising a nucleic acid sequence of a B19 comprising a polynucleotide sequence of SEQ ID NO:307 or SEQ ID NO:308.

[0106] In an embodiment, a vector identified as pB19-M20 comprises a full length B19 having a SEQ ID NO:307 but with a change at nucleotide 2285 from a cytosine to a thymine, resulting in conversion of a BsrI site to a Dde site (U.S. 20060008469; Zhi et al., 2004, Virology, 318:142-152).

[0107] An infectious clone of B19 can be a full-length genome or portion of a genome of a parvovirus B19 isolate cloned into a replicable vector that provides for amplification of the viral genome in a cell. Infectious B19 clones and methods of making infectious B19 clones are described, for example, in U.S. 20060008469, Zhi et al., 2004, Virology, 318:142-152, and Zhi, et. al., 2006, Journal of Virology, in press. In some embodiments, a portion of the B19 genome comprises or consists of nucleic acid sequence encoding at least one P6 promoter ITR, VP2, VP1, NS, and 11-kDa in a single replicable vector. In some embodiments, the replicable vector includes at least one of an origin of replication, a selective marker gene, a reporter gene, a P6 promoter or the ITRs.

[0108] In other embodiments, the viral genome is a full-length genome. A full length genome comprises a complete coding sequence of a viral genome that comprises at least 75% or greater of the nucleotide sequence that forms the hairpin of the ITR at the 5′ end and 3′ end of the genome. In an embodiment, the coding sequence comprises nucleic acid sequence encoding VP1, VP2, NS, 11-10a protein, 7.5-kDa protein, and putative protein X.

[0109] In an embodiment, the parvovirus B19 genome comprises one or more ITR sequences. Preferably, the B19 genome comprises an ITR sequence at the 5′ end and the 3′ end. An ITR may be about 350 nucleotides to about 400 nucleotides in length. An imperfect palindrome may be formed by about 350 to about 370 of the distal nucleotides, more preferably about 360 to about 365 of the distal nucleotides. Preferably the imperfect palindrome forms a double-stranded hairpin. In an embodiment, the ITRs are about 383 nucleotides in length, of which about 365 of the distal nucleotides are imperfect palindromes that form double-stranded hairpins. In another embodiment, the ITRs are about 381 nucleotides in length, of which about 361 of the distal nucleotides are imperfect palindromes that form double-stranded hairpins. In some embodiments, a B19 genome comprises at least 75% of the nucleotide sequence that forms the hairpin in the ITR at the 5′ end and 3′ end of the genome. In other embodiments, the ITRs may have 1 to about 5 nucleotides deleted from each end. The lilts may be in the “flip” or “flop” configuration.

[0110] The B19 clones may be synthesized or prepared by techniques well known in the art. Some nucleotide sequences for parvovirus B19 genomes are known and readily available, for example, on the Internet at GenBank (accessible at www-ncbi-nlm-nihgov/entrez). The nucleotide sequences encoding the B19 clones of the invention may be synthesized or amplified using methods known to those of ordinary skill in the art including utilizing DNA polymerases in a cell free environment. Methods for preparing, amplifying, and producing vectors comprising a B19 genome are disclosed, for example, in U.S. 20060008469 and Zhi et al., 2004, Virology, 318:142-152.

[0111] The B19 clones can be produced from a virus obtained from biological samples. The B19 virus isolates can be obtained from biological samples obtained from infected humans. The biological sample can include blood, serum, tissue, biopsy, urine, and the like.

[0112] The polynucleotides may be produced by standard recombinant methods known in the art, such as polymerase chain reaction (Sambrook, et al., 1989, Molecular Cloning, A Laboratory Manual, Vols. 1-3, Cold Spring Harbor Press, Cold Spring Harbor, N.Y. Methods of altering or modifying nucleic acid sequences are also known to those of skill in the art.

[0113] In some embodiments, the parvovirus B19 genome is introduced into the cell by uptake into the cell through a receptor, such as globoside. In some cases, the cells are contacted with a biological sample comprising infectious parvovirus B19 virus. In an embodiment, cells are contacted with about 100 or more genomes/ml of infectious virus, more preferably about more preferably 10³ to 10⁶ genomes/ml. In an embodiment, cells are contacted with an MOI of 0.01 to 100,000.

[0114] D. Introduction of B19 Virus into Cells and Methods of Detection

[0115] A method of the disclosure comprises introducing a vector comprising an infectious clone of parvovirus B19 or all or a portion of a viral genome into erythroid progenitor cells or infecting erythroid progenitor cells with parvovirus B19 particles, culturing the cells under conditions that provide for replication of the viral genome, and optionally, detecting production of viral genome or particles. In an embodiment, the method comprises introducing a vector comprising all or a portion of a viral genome into CD36⁺ erythroid progenitor cells; incubating the cells for a sufficient time to produce infectious virus; and detecting production of infectious virus. The CD36+ cells can be primary cells or cells transformed with the vectors as described herein. In some embodiments the CD36+ cells (whether primary, secondary or immortalized) have been cultured for at least 7 days and up to 40 days.

[0116] Introduction of B19 genome or a vector comprising a B19 genome into a eukaryotic host cell can be facilitated by calcium phosphate transfection, DEAE-dextran mediated transfection, cationic lipid-mediated transfection, electroporation, electrical nuclear transport, chemical transduction, electrotransduction, infection, or other methods. Such methods are described in standard laboratory manuals such as Sambrook, et al., 1989, Molecular Cloning, A Laboratory Manual, Vols. 1-3, Cold Spring Harbor Press, Cold Spring Harbor, N.Y. or Davis et al., 1986, Basic Methods in Molecular Biology. In an embodiment, the host cell is a CD36⁺ erythroid progenitor cell.

[0117] Commercial transfection reagents, such as Lipofectamine (Invitrogen, Carlsbad, Calif.) and FuGENE 6™ (Roche Diagnostics, Indianapolis, Ind.), are also available. Preferably transfection efficiency of the host cells is about 15% or greater, more preferably about 20% or greater, more preferably about 30% or greater, more preferably about 40% or greater, more preferably about 50% or greater, more preferably about 70% or greater.

[0118] In some embodiments, a high efficiency of introduction of the vector into the CD36⁺ erythroid progenitor cells is desired. Preferably, the method of introduction employed achieves a transfection efficiency of at least about 15% to 100% efficiency, more preferably about 30 to 50% efficiency. The method is also selected to minimize cytotoxicity to the cells. Preferably, about 20% or greater of the cells are viable and more preferably about 50% of the cells or greater. In some embodiments, the vector may be cut with one or more restriction enzymes to enhance viral replication.

[0119] In an embodiment, CD36⁺ erythroid progenitor cells are transfected with an electric current. Methods of transfecting eukaryotic cells utilizing an electric current are known in the art, such as for example, electroporation (Sambrook, et al., 1989, Molecular Cloning, A Laboratory Manual, Vols. 1-3, Cold Spring Harbor Press, Cold Spring Harbor, N.Y. or Davis et al., 1986, Basic Methods in Molecular Biology) and electrical nuclear transport (U.S. 20040014220).

[0120] In an embodiment, the CD36⁺ erythroid progenitor cells are transfected by electrical nuclear transport. The cells are exposed to an electrical pulse comprising a field strength of about 2 kV/cm to about 10 kV/cm, a duration of about 10 μsec to about 200 μsec, and a current of at about 1 A to about 2.5 A followed by a current flow of about 1 A to about 2.5 A for about 1 msec to about 50 msec. A buffer suitable for use in electrical nuclear transport comprises 0.42 mM Ca(NO₃)₂, 5.36 mM KCl, 0.41 mM MgSO₄, 103 mM NaCl, 23.8 mM NaHCO₃, 5.64 mM Na₂HPO₄, 11.1 mM d(+) glucose, 3.25 μM glutathione, 20 mM Hepes, and pH 7.3. Following transfection, the permissive cells may be incubated for about 10 min at 37° C. before being plated in prewarmed (37° C.) culture medium with serum and incubated at 37° C.

[0121] Commercially available devices and buffer systems for electrical nuclear transport, such as for example the AMAXA CELL LINE NUCLEOFECTOR™ system (Amaxa Biosystems Inc., Nattermannallee, Germany; www-amaxa-com), have been customized to transduce specific types of eukaryotic cells. In an embodiment, CD36⁺ erythroid progenitor cells are transfected using NUCLEOFECTOR™ reagent V and program T-19 on the NUCLEOFECTOR™ device according to the manufacturer's instructions (Amaxa Biosystems Inc., Nattermannallee, Germany). In another embodiment, CD36⁺ erythroid progenitor cells are transfected using NUCLEOFECTOR™ reagent R and program T-20 or V-001. In another embodiment, CD36⁺ erythroid progenitor cells are transfected using NUCLEOFECTOR™ reagent monocyte cell and program Y-001. In another embodiment, CD36⁺ erythroid progenitor cells are transfected using NUCLEOFECTOR™ reagent CD34 progenitor cells and program U-08.

[0122] In some embodiments, the viral stock can be diluted. Typically, viral stocks include about 10¹² to 10¹³ genomes/ml. Viral stocks can be diluted from about 10⁻³ to about 10⁻¹⁰ fold. In some embodiments, the virus can be diluted to about 10⁻⁸ and virus replication can still be detected in permissive cells such as the CD36+ cells described herein.

[0123] The cells can be incubated in culture medium following contact with infectious parvovirus B19 or introduction of the vector comprising a B19 genome. In an embodiment, cells infected with B19 are incubated at 4° C. for 2 hours to allow for viral attachment to the cell. In some embodiments, the unattached virus is removed from the culture after the attachment period. In some embodiments, the unattached virus is not removed from the culture. Transfected cells can be plated in culture medium immediately following transfection. The cells may be incubated for about 10 min to about 30 min at about 25° C. to about 37° C., more preferably about 30° C. to about 37° C., more preferably 37° C. before plating the cells. Once plated, the cells are incubated under conditions sufficient to provide for production of viral genomes. In some embodiments, the infected cells or transfected cells are incubated at 37° C. for about 2 to about 4 hours, more preferably at least about 6 hours, more preferably at least about 12 hours, more preferably at least about 18 hours, more preferably at least about 24 hours and more preferably up to 48 hours. In an embodiment, the infected or transfected cells are incubated for about 48 hours. In some embodiments, the infected or transfected cells are incubated for about one to five days or even up to 7 days. Infectious virus particles can be isolated or recovered from supernatants or cell lysates. In an embodiment, B19 is harvested from the supernatant of the infected cells.

[0124] To determine if B19 virus produced by the methods of the invention is infectious, supernatants prepared from infected or transfected cells or cell lysates from infected or transfected cells can be used to infect non-infected or non-transfected eukaryotic cells. In an embodiment, the eukaryotic cells are permissive. Examples of permissive cells include, but are not limited to, primary erythroid progenitor cells from bone marrow, fetal liver and blood; megakaryoblast cells; UT7/Epo cells, UT7/Epo-S1 cells, KU812Ep6 cells, JK-1, MB-O2 and CD36⁺ erythroid progenitor cells. Other eukaryotic cell types may also be utilized including 293 cells, CHO cells, Cos cells, Hela cells, BHK cells, K562 and SF9 cells. In an embodiment, the non-infected or non-transfected cells are UT7/Epo-S1 cells or CD36⁺ erythroid progenitor cells.

[0125] In some embodiments, production of B19 viral genomes by the methods of the invention may be detected by analyzing the infected cells for B19 DNA. In some embodiments, an increase in viral DNA is detected. Methods for detecting B19 DNA include, but are not limited to, PCR and quantitative PCR (qPCR). In some embodiments, B19 infection can be determined by detection of B19 transcripts. In an embodiment, the spliced transcripts are spliced capsid transcripts encoding, for example, VP1 or VP2. In an embodiment, the spliced transcripts are alternatively spliced capsid transcripts encoding, for example, VP1 or VP2. The methods of detection include but are not limited to, PCR and quantitative PCR (qPCR).

[0126] In some embodiments, B19 infected cells can be detected by antibodies that specifically bind to B19 proteins, such as the capsid protein. In other embodiments, B19 infected cells can be identified by the presence of cytopathology. Methods for such detection are known to those of skill in the art.

[0127] In some embodiments, B19 infected cells can be identified by identifying differential regulation of one or more genes as shown in Table 15 or Table 16.

[0128] Production of infectious virus by infected permissive cells can be determined by infecting uninfected cells using supernatant from the infected cells or using the cell lysate of infected cells. In an embodiment, infectious B19 is detected by infecting cells with supernatant from the previously infected cells and analyzing the cells for B19 transcripts. In an embodiment, infectious B19 is detected by infecting cells with supernatant from the infected transformed cells and analyzing the cells for B19 transcripts. Detection of spliced capsid transcripts, NS transcripts, or other viral transcripts indicate that the parvovirus B19 is infectious. In an embodiment, detection of capsid transcripts or NS transcripts indicates the parvovirus B19 is infectious.

[0129] Production of infectious B19 virus can also be detected by analyzing the infected cells for B19 viral proteins. Detection of B19 capsid proteins indicates the parvovirus B19 is infectious. In an embodiment, the B19 viral proteins are capsid proteins, such as for example VP1 and VP2. In an embodiment, infectious parvovirus B19 virus is identified by contacting cells with supernatant from the transfected cells and analyzing the contacted cells for B19 viral proteins. In another embodiment, in vitro neutralization assays can be performed to test whether neutralizing monoclonal antibodies against parvovirus B19 capsids are able to block the infection caused by the cell lysates of transfected cells. Blocking of infectivity by neutralizing antibodies is one method to determine if the virus is infectious.

[0130] E. Diagnostic Methods

[0131] The disclosure provides for methods of diagnosis of B19 infected cells and/or B19 infection. In an embodiment the CD36+ erythroid progenitor cells (whether primary, secondary, or immortalized) are used to detect the presence of B19 infectious virus from a sample. The CD36+ cells may be frozen and thawed, and then cultured in expansion medium to provide a cell culture for detecting infectious B19 from a biological sample. Samples can include blood, tissue sample, urine, amniotic fluid, placental microvilli, cord blood, serum and the like.

In an embodiment, a method for detecting parvovirus B19, comprises contacting a CD 36⁺ erythroid progenitor cell with a sample and culturing the cell under conditions to provide for replication of parvovirus B19 genome. The CD36+ erythroid progenitor cell can be a primary, secondary, or immortalized cell, and may be frozen and then thawed. The CD36⁺ erythroid cells are cultured in expansion medium as described herein. In some embodiments, the CD 36+ erythroid cell population has at least 25% CD36, globoside or both positive cells. In some embodiments, the CD 36+ erythroid cell population is at least 25% to 100% of the cells are CD36+ and globoside+cells, and less than 70% of the cells are CD33⁺.

[0132] In some embodiments, the CD36+ erythroid cells are cultured for a 1, 2, 3, 4, 5, 6, 7, 8, 9, 10, and any number up to 350 days in culture. In some embodiments, the cells can be cultured indefinitely. In some embodiments, the CD36+ erythroid cells are cultured for at least 4 days before contact with the sample.

[0133] In an embodiment, after contact with the sample, the CD36+ cells are incubated for at least 3, 6, 12, 24, 48 hours or more. In some embodiments, the CD36+ cells are incubated for at least 6 to 48 hours. The virus can be incubated for at least 5 days and the culture can be continued for at least 7 days in the presence of fresh medium. The presence of B19 virus can be detected by a variety methods including, detecting viral DNA, viral transcripts, the presence of viral antigens using antibodies, using the supernatant to reinfect a permissive cell culture, and detecting cytopathology as described previously hereon. One or more of these methods may be used in conjunction with each other.

[0134] The invention also provides methods for screening for antagonists that may inhibit or antagonize B19 infection. Antagonists can include antibodies, antisense, si RNA, aptamers, and small molecule inhibitors. Some antibodies may be defined as neutralizing antibodies. In an embodiment, the method comprises contacting a sample comprising B19 with a candidate antagonist and administering the contacted B19 to cells of the invention. Candidate compounds that inhibit infection of the cells of the invention are identified as antagonists. The antagonist effect of a candidate antagonist is determined by analyzing cells for B19 capsid proteins or B19 transcripts as described above.

[0135] The invention also provides methods for screening for antibodies that may inhibit or antagonize B19 infection of the permissive cells of the invention. Some antibodies maybe defined as neutralizing antibodies. In an embodiment, the method comprises contacting a sample comprising B19 with a candidate antibody and administering the contacted B19 to cells of the invention. Candidate antibodies that inhibit infection of the cells of the invention are identified as antagonist antibodies. The antagonist effect of anti-B19 antibodies may be determined by analyzing cells for B19 capsid proteins or B19 transcripts as described above. Methods for producing antagonist antibodies are known. Antagonist antibodies can be prepared and screened for as described, for example, in U.S. 2006/0008469.

[0136] The invention can be used to identify infectious B19 virions. B19 has been known to produce 1 infectious particle in 10e3 to 10e5 particles. B19 DNA has also been known to persist for years after infection of an individual. Using CD36⁺ erythroid cells would determine the presence of infectious virions by the production of B19 transcripts or increasing DNA production.

[0137] In some embodiments, kits for diagnosis of B19 infection can include CD36+ erythroid progenitor cells and one or more of empty viral capsids, antibodies to B19 proteins such as capsid proteins, probes or primers for detecting B19 viral transcripts and B19 genomes. In some embodiments, the kit includes a B19 virus for comparison purposes. In some embodiments, the B19 virus is a viral clone in a replicable vector. In some embodiments, the kit comprises a composition comprising parvovirus B19 of at least about 10³ to 10¹⁰ genomes/ml, more preferably about 10³ to 10⁶ genomes/ml. The composition can then be diluted to provide for a consistent amount of virus to analyze each sample. Alternatively, the kit may contain about 10³ to 10¹⁰ virus particles or portions thereof in a composition or attached to an assay surface, excluding empty viral capsid.

[0138] Genes differentially expressed in viral infected cells can be utilized in diagnostic kits and methods for detection of B19 infected cells. The gene expression profile of one or more genes differentially regulated can be used to identify virus infected cells. Such genes can be selected from those provided in Table 15 and/or Table 16. Other markers of B19 infected cells include one or more of differentially expressed genes as shown in Table 15 or Table 16, comparing timepoint zero infection to any other timepoint (3, 6, 12, 24, and 48) hours post-infection. In some embodiments, the diagnostic assay or kit may include detecting 1, 2, 3, 4, 5, 6, 7, 8, 9, 10, and any number up to all of the 309 genes. Probes, primers, and antibodies for detecting the genes or gene products in Table 15 can readily obtained by those of skill in the art. It is understood in the art that a polynucleotide encoding a gene product can be represented by a number of different transcript sequences and/or detected using a number of different probes and/or primers. A number of different publicly available and fee based databases provide for information regarding those sequences and the availability of probes or primers for detecting any of the genes presented in Table 15 or 16. Such databases include the NCBI database, Unigene database, the IMAGE consortium, Affymetrix, Agilent, Invitrogen, and Genecards databases.

[0139] The reagents for detection include antibodies, probes, primer, reagents for assay of activity of the biomarker. Such methods are known to those of skill in the art and include ELISA, PCR, Immunofluorescence, western blots, southern blots, and microarray detection using oligonucleotides or antibodies. In some embodiments, the kit or microarray does not detect more than 400 different genes or ests. In some embodiments, the kit or microarray does not detect more than 400, 399, 398, 397 and any number down to at least 2 different genes. In some embodiments, the kit or microarray does not detect more than 400 different genes or ests and includes at least one an antibody or oligonucleotide for detecting a B19 transcript such as a capsid protein. In some embodiments, the kit or microarray does not detect more than 400 different genes or ests and includes at least one an antibody or oligonucleotide for detecting a B19 transcript such as a capsid protein or for detecting a viral genome for example by detecting at least one of the ITRs or the P6 promoter. In some embodiments, a kit comprises antibodies or oligonucleotides that bind to and detect all B19 viral transcripts and/or the viral genome, for example by detecting at least one of the ITRs or the P6 promoter.

[0140] Some of the genes differentially expressed may be detected as secreted products using antibodies or other assays, for example, Luminex technology as described at the Luminex web page. In other embodiments, the genes selected that are differentially expressed are increased or decreased at least two fold at 48 hours post infection.

[0141] In some embodiments, a kit or microarray may include oligonucleotides or antibodies for the detection of one or more of the following genes shown in Table 16. In some embodiments, the kit or microarray include one or more control or housekeeping genes. In some embodiments the kit or micrarray includes antibodies or oligonucleotides for detecting a B19 transcript, genome, or protein. In some embodiments, the kit or microarray does not include detecting more than 400 different genes or ests. In some embodiments, the kit includes a B19 virus for comparison purposes. In some embodiments, the kit or microarray does include an antibody or oligonucleotide for detecting a B19 transcript such as capsid protein such as VP1 or VP2. In some embodiments, the kit or microarray includes an antibody or oligonucleotide for at least one of the 1, 2, 3, 4, 5, 6, 7, 8, 9, 10, 11, 12, 13, and 14 of the genes shown in Table 16. The table below shows the top gene genes differentially expressed (fold increase or decrease) at timepoints 6 hours and 48 hours post-infection. The sequences and gI numbers for these genes are provided in Table 15.

TABLE 16

| Description | 6 hr PI |
|---|---|
| interleukin 8 | 2.225 |
| elastase 2, neutrophil | 1.831 |
| Nuclear factor I/A | 1.804 |
| myeloperoxidase | 1.792 |
| AV711904 DCA Homo sapiens cDNA clone DCAAIE08 5′, | 1.756 |
| mRNA sequence. | |
| Cytochrome P450, family 1, subfamily B, polypeptide 1 | 1.66 |
| ATP synthase, H+ transporting, mitochondrial F1 | 1.61 |
| complex, gamma polypeptide | |
| interferon-induced protein 44 | 1.598 |
| immediate early response 3 | 1.583 |
| interferon-induced protein with tetratricopeptide | 1.569 |
| repeats 1 | |
| Description | 48 hr PI |
| AV711904 DCA Homo sapiens cDNA clone DCAAIE08 5′, | 5.34 |
| mRNA sequence. | |
| Charcot-Leyden crystal protein | 4.35 |
| tachykinin 3 (neuromedin K, neurokinin beta) | 3.917 |
| cytochrome P450, family 1, subfamily B, polypeptide 1 | 3.833 |
| elastase 2, neutrophil | 3.638 |
| myeloperoxidase | 3.21 |
| myeloperoxidase | 3.124 |
| Cytochrome P450, family 1, subfamily B, polypeptide 1 | 3.121 |
| carboxypeptidase A3 (mast cell) | 2.952 |
| actin, alpha 2, smooth muscle, aorta | 2.944 |

[0142] In some embodiments, the methods for diagnosing or detecting and/or the kits include detecting one or more of the genes of Table 15 that have at least a two fold change in expression. In some embodiments the methods for diagnosing or detecting and/or the kits include detecting one or more of the genes: TGD (SEQ ID NO:121), MT1E (SEQ ID NO:278), NIP3 (SEQ ID NO:301), MT1 (SEQ ID NO:295), MT1 (SEQ ID NO:280), Car3 (SEQ ID NO:155), NF1A (SEQ ID NO:238), TGD (SEQ ID NO:129), (SEQ ID NO:251), NKB (SEQ ID NO:4), CALB1 (SEQ ID NO:67), COCH (SEQ ID NO:30), ATDC (SEQ ID NO:117), CALB (SEQ ID NO:89), HSP72 (SEQ ID NO:156), HSP72 (SEQ ID NO:175), c-fos (SEQ ID NO:159), NE (SEQ ID NO:5), AD2 (SEQ ID NO:94), IL-6 (SEQ ID NO:7), HSP70-2 (SEQ ID NO:221), AZU (SEQ ID NO:22), TOMM40 (SEQ ID NO:34), IBP2 (SEQ ID NO:120), IL-8 (SEQ ID NO:157), K60 (SEQ ID NO:114) or (SEQ ID NO:306), EV19 (SEQ ID NO:279), CSH1 (SEQ ID NO:183), MB2 (SEQ ID NO:97), GRO2 (SEQ ID NO:147), DEC1 (SEQ ID NO:277), SLC25A37 (SEQ ID NO:299) and combinations thereof.

[0143] F. Uses

[0144] Particles or clones produced by the methods and CD36⁺ erythroid progenitor cells of the invention can be utilized in a variety of assays and to develop therapeutic products. As discussed previously, a permissive cell line capable of producing useful quantities of B19 and methods for consistently obtaining significant amounts of infectious virus in cell culture were not readily available. An in vitro system for producing virus particles can be used in diagnostic methods to identify the presence of virus in a variety of diseases and disorders. An in vitro system for producing virus particles can be used in screening methods to identify agents such as antibodies or antisense molecules that can inhibit viral infectivity or reproduction. The virus particles and/or clones in a cell of the invention can be utilized to form immunogenic compositions to prepare therapeutic antibodies or vaccine components. Antibodies and primers can be developed to specifically identify different parvovirus B19 isolates. The ability to produce virus particles consistently in vitro is also useful to produce attenuated virus that may be used in a vaccine.

[0145] Parvovirus B19 particles or B19 clones and CD36+ erythroid cells produced by the methods and cell line of the invention are useful in diagnostic assays and kits. The presence or absence of an antibody in a biological sample that binds to a B19 clone produced by the methods and cells of the invention can be determined using standard methods. In an embodiment, the diagnostic assay kit is a serological assay kit that contains B19 particles produced by the method and cells of the invention. Such an assay kit will be sensitive and cost effective because using the entire virus will allow for detection of antibodies to epitopes as presented by naturally occurring virus.

[0146] The B19 particles and/or clones of the invention are also useful to produce antibodies to parvovirus B19. The antibodies are useful in diagnostic assays for detecting the presence of parvovirus B19 virus particles in a biological sample. Methods for producing antibodies are known. Antibodies to B19 and methods for developing antibodies to B19 are described, for example, in U.S. 2006/0008469. Antibodies are useful in diagnostic assays, and to develop therapeutics.

[0147] The invention also provides methods for screening for antibodies that may inhibit or antagonize B19 infection of the permissive cells of the invention. Some antibodies maybe defined as neutralizing antibodies. In an embodiment, the method comprises contacting a sample comprising B19 with a candidate antibody and administering the contacted B19 to cells of the invention. Candidate antibodies that inhibit infection of the cells of the invention are identified as antagonist antibodies. The antagonist effect of anti-B19 antibodies may determined by analyzing cells for B19 capsid proteins or B19 transcripts as described above. Methods for producing antagonist antibodies are known. Antagonist antibodies can be prepared and screened for as described, for example, in U.S. 2006/0008469.

[0148] The invention can be used to identify infectious B19 virions. B19 has been known to produce 1 infectious particle in 10e3 to 10e5 particles. B19 DNA has also been known to persist for years after infection of an individual. Using CD36⁺ cells would determine the presence of infectious virions by the production of B19 transcripts of increasing DNA production.

[0149] Infectious B19 produced by the methods and cells of the invention can be used as immunogenic compositions to prepare vaccine components and/or to develop antibodies that can be used in diagnostic or other assays. For example, cells of the invention comprising B19 virus particles and/or clone can be heat inactivated and used as an immunogen. Passaging of a virus particle and/or clone in cells of the invention can provide an attenuated strain of B19 useful in vaccine compositions. In some embodiments, the immunogenic composition comprises at least about 10³ to about 10¹⁰ viral genomes or viral particles/ml. A vaccine against B19 would be useful, for example, for preventing B19 associated diseases and treating patients with hereditary anemias, such as sickle cell anemia, who are susceptible to transient aplastic crises, seronegative pregnant women who are at risk for hydrops fetalis, and immunocompromised individuals at risk for persistent infection and chronic red cell aplasia.

[0150] Genes differentially expressed in viral infected cells can be utilized in diagnostic kits and methods for detection of B19 infected cells. The gene expression profile of one or more genes differentially regulated can be used to identify virus infected cells. Such genes can be selected from those provided in Table 15. The reagents for detection include antibodies, probes, primer, reagents for assay of activity of the biomarker. Such methods are known to those of skill in the art and include ELISA, PCR, Immunofluorescence, western blots, southern blots, and microarray detection using oligonucleotides or antibodies. Other markers of B19 infected cells include one or more of differentially expressed genes as shown in Table 15, comparing timepoint zero infection to any other timepoint (3, 6, 12, 24, and 48) hours post-infection. In some embodiments, the diagnostic assay or kit may include detecting 1, 2, 3, 4, 5, 6, 7, 8, 9, 10, and up to all of the 309 genes. In some embodiments, the kit or microarray do not include more than 400 different antibodies or oligonucleotides. In some embodiments, the kit or microarray do not include more than 400 different antibodies or oligonucleotides and does include an antibody or oligonucleotide for detecting the B19 capsid protein.

[0151] Some of the genes differentially expressed may be detected as secreted products. In other embodiments, the genes selected that are differentially expressed are increased or decreased at least two fold at 48 hours post infection.

[0152] In some embodiments, a kit or microarray may include oligonucleotides or antibodies for the detection of one or more of the following genes shown in Table 16. In some embodiments, the kit or microarray include one or more control or housekeeping genes. In some embodiments the kit or micrarray include antibodies or oligonucleotides for detecting the B19 transcript or proteins. In some embodiments, the kit or microarray do not include more than 400 different antibodies or oligonucleotides. In some embodiments, the kit or microarray do not include more than 400 different antibodies or oligonucleotides and does include an antibody or oligonucleotide for detecting a B19 capsid protein such as VP1 or VP2. In some embodiments, the kit or microarray includes an antibody or oligonucleotide for at least one of 1, 2, 3, 4, 5, 6, 7, 8, 9, 10, 11, 12, 13, and 14 of the genes shown in Table 16. The table below shows the top gene genes differentially expressed (fold increase or decrease) at timepoints 6 hours and 48 hours post-infection.

[0153] G. Production of Antibodies

[0154] 1. Polyclonal Antibodies

[0155] Polyclonal antibodies to B19 produced by the cells and methods of the invention are preferably raised in animals by multiple subcutaneous (sc) or intraperitoneal (ip) injections of the relevant antigen and an adjuvant. The relevant antigen may be, for example, one or more B19 clones produced by the cells and methods of the invention or one or more B19 proteins, such as NS, VP1, VP2, 11-kDa protein, 7.5-kDa protein, and/or protein X, derived from an infectious clone produced by the cells and methods of the invention or virus particle such as those produced by the methods as described herein. It may be useful to conjugate the relevant antigen to a protein that is immunogenic in the species to be immunized, e.g., keyhole limpet hemocyanin, serum albumin, bovine thyroglobulin, or soybean trypsin inhibitor using a bifunctional or derivatizing agent, for example, maleimidobenzoyl sulfa succinimide ester (conjugation through cysteine residues), N-hydroxysuccinimide (through lysine residues), glutaraldehyde, succinic anhydride, SOCl₂, or R¹N═C═NR, where R and R¹ are different alkyl groups.

[0156] Animals are immunized against the antigen, immunogenic conjugates, or derivatives by combining, e.g., 100 μg or 5 μg of the protein or conjugate (for rabbits or mice, respectively) with 3 volumes of Freund's complete adjuvant and injecting the solution intradermally at multiple sites. One month later the animals are boosted with ½ to 1/10 the original amount of peptide or conjugate in Freund's complete adjuvant by subcutaneous injection at multiple sites. Seven to 14 days later the animals are bled and the serum is assayed for antibody titer. Animals are boosted until the titer plateaus. Preferably, the animal is boosted with the conjugate of the same antigen, but conjugated to a different protein and/or through a different cross-linking reagent. Conjugates also can be made in recombinant cell culture as protein fusions. Also, aggregating agents such as alum are suitably used to enhance the immune response.

[0157] In an alternative embodiment, the animals are immunized with a recombinant vector expressing one or more viral proteins derived from an infectious particle or clone produced by the cells or methods of the invention, such as for example VP1 and/or VP2, followed by booster immunizations with the viral proteins.

[0158] The polyclonal antibodies generated by the immunizations may undergo a screen for B19 antagonist activity. Preferably, antibodies to a B19 virus particle and/or clone inhibit the negative effect of B19 on erythrocyte production. In an embodiment, antibodies that specifically bind a B19 virus particle and/or clone encoded by a polynucleotide comprising a nucleic acid sequence of SEQ ID NO:1 inhibits infection of permissive cells.

[0159] The polyclonal antibodies are also screened by enzyme-linked immunoabsorbent assay (ELISA) to characterize binding. The antigen panel includes NS, VP1, VP2, 11-kDa protein, 7.5-kDa protein, protein X, and virus particles. Animals with sera samples that test positive for binding to one or more experimental antigens in the panel are candidates for use in monoclonal antibody production. The criteria for selection for monoclonal antibody production is based on a number of factors including, but not limited to, binding patterns against a panel of B19 viral proteins.

[0160] 2. Monoclonal Antibodies

[0161] Monoclonal antibodies to a B19 produced by the cells and methods of the invention may be made using the hybridoma method first described by Kohler et al., Nature, 256:495 (1975), or may be made by recombinant DNA methods (U.S. Pat. No. 4,816,567).

[0162] In the hybridoma method, a mouse or other appropriate host animal, such as a hamster or macaque monkey, is immunized as described above to elicit lymphocytes that produce or are capable of producing antibodies that will specifically bind to a B19 particle and/or clone or viral proteins derived from a B19 particle and/or clone used for immunization. Alternatively, lymphocytes may be immunized in vitro. Lymphocytes then are fused with myeloma cells using a suitable fusing agent, such as polyethylene glycol, to form a hybridoma cell (Goding, Monoclonal Antibodies: Principles and Practice, pp. 59-103 (Academic Press, 1986)).

[0163] The hybridoma cells are than seeded and grown in a suitable culture medium that preferably contains one or more substances that inhibit the growth or survival of the unfused, parental myeloma cells. For example, if the parental myeloma cells lack the enzyme hypoxanthine guanine phosphoribosyl transferase (HGPRT or HPRT), the culture medium for the hybridomas typically will include hypoxanthine, aminopterin, and thymidine (HAT medium), which substances prevent the growth of HGPRT-deficient cells.

[0164] Preferred myeloma cells are those that fuse efficiently, support stable high-level production of antibody by the selected antibody-producing cells, and are sensitive to a medium such as HAT medium. Among these, preferred myeloma cell lines are murine myeloma lines, such as those derived from MOPC-21 and MPC-11 mouse tumors available from the Salk Institute Cell Distribution Center, San Diego, Calif. USA, and SP-2 or X63-Ag8-653 cells available from the American Type Culture Collection, Rockville, Md. USA. Human myeloma and mouse-human heteromyeloma cell lines also have been described for the production of human monoclonal antibodies (Kozbor, J. Immunol., 133:3001 (1984); Brodeur et al., Monoclonal Antibody Production Techniques and Applications, pp. 51-63 (Marcel Dekker, Inc., New York, 1987)).

[0165] Culture medium in which hybridoma cells are growing is assayed for production of monoclonal antibodies directed against the antigen and HIV Env. Preferably, the binding specificity of monoclonal antibodies produced by hybridoma cells is determined by immunoprecipitation or enzyme-linked immunoabsorbent assay (ELISA).

[0166] After hybridoma cells are identified that produce antibodies of the desired specificity, affinity, and/or activity, the clones may be subcloned by limiting dilution procedures and grown by standard methods (Goding, Monoclonal Antibodies: Principles and Practice, pp. 59-103 (Academic Press, 1986)). Suitable culture media for this purpose include, for example, D-MEM or RPMI-1640 medium. In addition, the hybridoma cells may be grown in vivo as ascites tumors in an animal.

[0167] The monoclonal antibodies secreted by the subclones are suitably separated from the culture medium, ascites fluid, or serum by conventional immunoglobulin purification procedures such as, for example, protein A-Sepharose, hydroxylapatite chromatography, gel electrophoresis, dialysis, or affinity chromatography.

[0168] The monoclonal antibodies are characterized for specificity of binding using assays as described previously. Antibodies can also be screened for antagonist activity as described previously.

[0169] 3. Human or Humanized Antibodies

[0170] Humanized forms of non-human (e.g., murine) antibodies are chimeric antibodies that contain minimal sequence derived from non-human immunoglobulin. For the most part, humanized antibodies are human immunoglobulins (recipient antibody) in which residues from a CDR of the recipient are replaced by residues from a CDR of a non-human species (donor antibody) such as mouse, rat, rabbit or nonhuman primate having the desired specificity, affinity, and capacity. Useful non-human antibodies are monoclonal antibodies that bind specifically to parvovirus B19. Useful non-human antibodies also include antibodies that inhibit B19 infection of permissive cells. In some instances, framework region (FR) residues of the human immunoglobulin are replaced by corresponding non-human residues. Furthermore, humanized antibodies may comprise residues that are not found in the recipient antibody or the donor antibody. These modifications may be made to improve antibody affinity or functional activity. In general, the humanized antibody will comprise substantially all of at least one, and typically two, variable domains, in which all or substantially all of the hypervariable regions correspond to those of a non-human immunoglobulin and all or substantially all of the FRs are those of a human immunoglobulin sequence. The humanized antibody optionally will also comprise at least a portion of an immunoglobulin constant region (Fc), typically that of a human immunoglobulin. For further details, see Jones et al., Nature 321:522-525 (1986); Riechmann et al., Nature 332:323-329 (1988); and Presta, Curr. Op. Struct. Biol. 2:593-596 (1992). See also the following review articles and references cited therein: Vaswani and Hamilton, Ann. Allergy, Asthma & Immunol. 1:105-115 (1998); Harris, Biochem. Soc. Transactions 23:1035-1038 (1995); Hurle and Gross, Curr. Op. Biotech 5:428-433 (1994).

[0171] Human antibodies that specifically bind and/or antagonize parvovirus B19 can also be made using the transgenic mice available for this purpose or through use of phage display techniques.

[0172] An in vitro system for producing infectious virus particles comprising the cells and methods of the invention can be used in screening methods to identify agents such as antibodies or antisense molecules that can inhibit viral infectivity or reproduction. A screening method comprises introducing the viral genome of an infectious particle and/or clone of parvovirus B19 into a cell of the invention, contacting the cells with a potential inhibitory agent, and determining whether the inhibitory agent inhibits infectivity or replication of the viral genome in the cells. Methods for detecting infectivity and replication of the viral genome have been described herein. Potential inhibitory agents include antibodies and anti sense molecules.

[0173] The ability to produce infectious parvovirus particles in vitro by the cells and methods of the invention allow for the development of a vaccine or vaccine components. A vaccine can be comprised of heat inactivated virus or attenuated virus. Inactivated virus particles can be prepared from production of infectious clones and/or particles using methods known to those of skill in the art. Attenuated virus can be obtained by serially passaging the virus under conditions that make the virus non pathological to humans. The attenuated virus is preferably passaged through a cell and under certain conditions that provide for an altered virus that is less pathological to humans. Vaccine components can also include one or more of the parvovirus proteins or parvovirus proteins combined with epitopes from other infectious agents.

[0174] The following examples are provided for illustrative purposes only, and are in no way intended to limit the scope of the present disclosure.

### EXAMPLES

### Example 1

### Erythroid Progenitor Cells Derived from CD34⁺G-CSF Mobilized Peripheral Blood Stem Cells (PBSC) are Permissive for Parvovirus B19 Infection and Produce Increased Amounts of Parvovirus B19 Compared to UT-7/Epo-S1 Cells

[0175] Parvovirus B19 (B19) is highly erythrotopic and replicates in erythroid progenitor cells found in bone marrow or fetal liver. A limited number of cell lines support B19 replication in vitro. Previous studies have shown that UT-7/Epo-S1 cells, a subclone of a megakaryoblastoid cell line with erythroid characteristics, to be one of the most permissive cell lines (Wong, et. al., 2006, Journal of Clinical Virology, 35:407-413). These cells, however, are only semi-permissive with limited replication of B19.

[0176] Methods for producing mature erythrocytes from CD34 hematopoietic stem cells have been reported (Giarratana et al., 2005, Nature Biotech., 23:69-74). This example describes a method for culturing CD36⁺ erythroid progenitor cells that are permissive to B19 infection from CD34+ or CD133+ hematopoietic stem cells. Recently, CD133 (formerly AC133) has been used to isolate hematopoietic stem cells and progenitor cells. CD133 has been used as a selective marker for immature hemtopoietic stem cell and progenitors.

### Methods

[0177] Cell Culture. Human CD34⁺ cells were isolated from G-CSF mobilized peripheral blood stem cells from normal donors by purification using the Baxter Isolex 300i Magnetic Cell Selection System. Human CD133⁺ cells were isolated from G-CSF mobilized peripheral blood stem cells from normal donors by purification using the Milotenyi Magnetic Cell Selection System. Prior to expansion and if necessary, the cells were cultured in maintenance media (BIT 9500 medium (StemCell Tech. Inc., Vancouver, British Columbia) diluted 1:5 in AMEM (Mediatech Inc., Herndon, Va.) and supplemented with 900 ng/ml ferrous sulfate (Sigma-Aldrich, St. Louis, Mo.) and 90 ng/ml ferric nitrate (Sigma-Aldrich)) and cultured in the maintenance media at 37° C. in 5% CO₂ for 4 days. The maintenance media had a final concentration of 10 mg/ml deionized BSA, 10 μg/ml recombinant human insulin, and 200 μg/ml iron saturated human transferrin.

[0178] Cell proliferation and erythroid differentiation was induced as follows. Approximate 1×10⁴ cells/mL were cultured in expansion media (maintenance media diluted 1:5 in AMEM and supplemented with 10⁻⁶M hydrocortisone, 5 ng/mL human IL-3 (R&D Systems, Minneapolis, Minn.) 100 ng/ml recombinant human stem cell factor (StemCell Tech. Inc., Vancouver, British Columbia), 3 IU/ml recombinant human erythropoietin (Amgen, Thousand Oaks, Calif.), 900 ng/ml ferrous sulfate (Sigma-Aldrich, St. Louis, Mo.) and 90 ng/ml ferric nitrate (Sigma-Aldrich)) at 37° C. with 5% CO₂ in air for 4 days and then the culture volume was expanded 1:5 in maintenance media for an additional 4 days. Once the cell density reached approximately 1−2×10⁶ cells/mL, cells were reduced to a concentration of about 1−5×10⁵ cells/mL. This allowed the culture to be maintained in an environment whereby the cytokines and growth factors would not be depleted. Cells were enumerated daily and would typically expand 3 to 5 logs within 21 days. (FIG. 1).

[0179] At days 1, 4, and 8 of cell culture in the expansion media, cells were sampled and analyzed for cell surface antigens by FACS. Approximately 5×10⁵ cells in a volume of 100 μl were centrifuged, washed with fresh AMEM, stained with 5 μl anti-CD36 FITC antibodies for 30 min. on ice, washed with AMEM, resuspended in 500 μl AMEM, and analyzed by FACS using the Beckman Coulter Cytomics FC500. Cells were also collected onto glass slides by cytocentrifugation (1500 rpm, 8 min.), fixed in methanol-acetone (1:1, −20° C.), stained with FITC, propidium iodide or DAPI, and observed under UV microscopy.

[0180] The megakaryoblastoid cell line UT-7/Epo-S1 was used as a comparative control for B19 infection (Shimomura et al., 1993, Virology, 194:149-156; Shimomura et al., 1992, Blood, 79:18-24, Wong, et. al., 2006, Journal of Clinical Virology, 35:407-413). The UT-7/Epo-S1 cells were cultured as previously described (Shimomura et al., 1993, Virology, 194:149-156; Shimomura et al., 1992, Blood, 79:18-24, Wong, et. al., 2006, Journal of Clinical Virology, 35:407-413). UT-7/Epo-S1 are megakaryocytes and most of the cells in the population express CD33 on the cell surface. Briefly, UT-7/Epo-S1 cells were cultured in Iscove's modified Dulbecco's medium (IMDM) supplemented with 10% fetal bovine serum, antibiotics, and 2 U/ml recombinant human erythropoietin (Amgen, Thousand Oaks, Calif.) at 37° C. in 5% CO₂.

[0181] To determine necessity for the expansion media cytokine cocktail, the erythroid progenitor cells and UT7/Epo-S1 cells were cultured in the same media used to culture UT7/Epo-S1 cells (IMDM supplemented with 2 IU EPO/mL) and also in IMDM media supplemented with 50 ng/mL rhuIL-3 and 5 IU rhuEPO/mL which is a media that typically used for culturing bone marrow cells. To determine if the expansion media would render UT7/Epo-S1 more permissive to B19 infection, these cells were also cultured in the expansion media.

[0182] Infection Assay. High titer B19 virus was obtained from different sources (Wong, et. al., 2006, Journal of Clinical Virology, 35:407-413). One source of parvovirus B19 (J35) was obtained from the serum of a child with sickle cell anemia undergoing aplastic crisis and sent to NIH for diagnostic purposes. This serum was found by dot blot assay (Nguyen et al., 2002, Virology, 301:374-380) to contain approximately 10¹³ genome copies of B19/ml. Viral stocks V1 and V2 were obtain from normal donors provided to us by Aris Lazo at V.I. Technologies (Watertown, Mass.). At day 8, cells were infected with the various dilutions of V1 serum containing 2×10¹² genome copies of B19/mL. In 96 well plates, 2×10⁴ cells were infected with 10 μl of serially diluted B19. The cells were incubated for 2 hr at 4° C. and then expanded with 80 μl of expansion media and incubated at 37° C. in 5% CO₂. In some cases, the infection assay is sealed up proportionately.

[0183] At different times post infection (from day 0 to day 5), DNA or RNA was extracted from infected CD36⁺ erythroid progenitor cells and UT7/Epo-S1 cells by QIAmp DNA mini Kit (Qiagen, Valencia, Calif.) or the RNEasy Micro Kit (Qiagen). Quantitative real-time PCR (qPCR), using the primers and probes shown in Table 3, was carried out using a Quantitect Probe PCR Kit (Qiagen) to detect B19 viral DNA Most of the reporters (6-FAM™, HEX™, TET™, Cy3™, Cy5™, JOE, etc.) and quenchers (TAMRA™, Iowa Black™, BHQ1®, BHQ2®, etc.) combinations can be used on the probes.

TABLE 3

SEQ

| | | |
|---|---|---|
| DNA | Primer/ | ID |

| region | Probe | Nucleotide Sequence | NO: |
|---|---|---|---|
| J35- | Forward | 5′ TACCTGTCTGGATTGCAAAGC 3′ | 309 |
| 2591F | | | |
| Capsid | | | |
| J35- | Reverse | 5′ GATGGGTTTTCTAGGGGATTATC 3′ | |
| 2591F | | | |
| Capsid | | | |
| J35 | Probe | 5′ 6-FAM-ATG GTG GGA AAG TGA | 311 |
| | | TGA TGA ATT TGC TA-3′BHQ | |

[0184] At different times post infection (from day 0 to day 5), RNA was extracted from infected CD36⁺ erythroid progenitor cells and UT7/Epo-S1 cells using GeneStrip™ System (RNAture, Irvine, Calif., USA, now Qiagen TurboCapture), followed by synthesis of the corresponding cDNA using 500 ng (5 μl from 100 ng/μl) of random primers (Invitrogen, Carlsbad, Calif., USA) and M-MLV RT Polymerase (Invitrogen) or Superscript II Reverse Transcriptase (Invitrogen) in a final volume of 50 μl. The cDNA samples were used for RT-PCR and quantitative real-time RT-PCR (qRT-PCR) assays. The RT-PCR reaction was carried out as previously described in Nguyen et al., 2002, Virology, 301:374-380 and amplicons were visualized by gel electrophoresis (2.5% NuSieve agarose gel). The qRT-PCR assays were performed as described above. The cDNA samples were amplified for capsid and NS transcripts for B19 and (3-actin, a housekeeping gene, using the primers and probes shown in Table 4.

TABLE 4

| | | | SEQ |
|---|---|---|---|
| | Primer/ | | ID |
| Transcript | Probe | Nucleotide Sequence | NO: |
| Capsid | Forward | 5′ CCTGGGCAAGTTAGCGTAC 3′ | 312 |
| | Reverse | 5′ ATGATCCTTGCAGCACTGTCA 3′ | 313 |
| | Probe | FAM-TATGTTGGGCCTGGCAA-BHQ1 | 314 |
| NS | Forward | 5′ GTTTTATGGGCCGCCAAGTA 3′ | 315 |
| | Reverse | 5′ ATCCCAGACCACCAAGCTTTT 3′ | 316 |
| | Probe | 5′ 6-FAM- | 317 |
| | | CCATTGCTAAAAGTGTTCCA-3′BHQ1 | |
| β-actin | Forward | 5′ GGCACCCAGCACAATGAAG 3′ | 318 |
| | Reverse | 5′ GCCGATCCACACGGAGTACT 3′ | 319 |
| | Probe | 5′ JOE- | 320 |
| | | TCAAGATCATTGCTCCTCCTGAGC | |
| | | GC-3′BHQ | |

[0185] Quantitation of each amplicon was performed by interpolation with the respective standard curve to each target (NS, CP, β-actin) constructed with serial dilutions of the correspondent plasmid.

[0186] At different times post infection (from day 0 until day 5), cells were cytocentrifuged (1500 rpm for 8 min in a Shandon cytospin 4 cytocentrifuge) onto glass slides. The cells were fixed in acetone:methanol (1:1) at −20° C. for 5 min, washed twice in phosphate buffered saline (PBS) containing 0.1% fetal bovine serum, and incubated with a murine anti-B19 capsid protein monoclonal antibody (521-5D, gift of Larry Anderson, CDC) in PBS with 10% fetal calf serum for 1 hr at 37° C. After washing the slides twice in PBS, the slides were incubated with fluorescein isothiocyanate (FITC)-labeled goat anti-mouse IgG antibody (Jackson ImmunoResearch Laboratories, Inc., West Grove, Pa.) in PBS with 10% fetal calf serum and counterstained with Evans Blue for 30 mins at 37° C., washed in PBS, and examined by UV microscopy.

### Results

[0187] We observed the expansion of the erythroid progenitor cells in culture starting with CD34+ cells from day 0 up to day 26. Maximum growth of the CD36⁺ erythroid progenitor cells in the expansion medium was observed between days 0 and 21 of culture (FIG. 1). Cell mortality was less than 5%.

[0188] If cells were provided fresh media and maintained at <2×10e6 cells/mL, we observed exponential growth between day 4 and 21. Flow cytometry analysis confirmed that the CD36⁺ cells were expressing erythroid lineage markers CD36 and glycophorin A (GpA) and most importantly expressing the B19 receptor, globoside, but not CD34 on the cell surface, whereas the parent CD34+ cells did not express CD36, GpA or globoside. (Table 5, Table 6). Flow cytometry analysis confirmed the purity and the complete differentiation of the CD34⁺ cells into CD36⁺ cells. At days 8, the cells were non-enucleated, positive for globoside on the cell surface, and in some cases, visibly red, indicating the presence of hemoglobin. *NT means “not tested”

TABLE 5

| | |
|---|---|
| Days in | Cell Surface Antigens (% positive cells) |

| Culture | CD34⁺ | CD3⁺ | CD19⁺ | CD36⁺ |
|---|---|---|---|---|
| pre-culture | 76 | 2 | 5 | NT |
| 1 | NT | NT | NT | 20 |
| 4 | NT | NT | NT | 73 |
| 8 | 1.2 | 0 | 0 | 97 |

TABLE 6

| Cell Surface | Day in culture (percentage of positive cells) | | | | | | | | |
|---|---|---|---|---|---|---|---|---|---|
| Antigens | 0 | 1 | 2 | 3 | 4 | 5 | 6 | 7 | 8 |
| Sample G | | | | | | | | | |
| Globoside | 5 | 9 | 28 | 39 | 39 | 59 | 79 | 85 | 90 |
| CD36 | 2 | 6 | 15 | 31 | 45 | 73 | 80 | 88 | 95 |
| CD34 | 80 | 95 | 87 | 74 | 18 | 1 | 0 | 1 | 0 |
| Sample H | | | | | | | | | |
| Globoside | 2 | 4 | 16 | 34 | 36 | 36 | 49 | 58 | 70 |
| CD36 | 2 | 3 | 5 | 15 | 24 | 35 | 50 | 60 | 64 |
| CD34 | 79 | Not Det. | 81 | 79 | 5 | 6 | 0 | 1 | 12 |
| Sample L | | | | | | | | | |
| Globoside | 6 | 2 | Not Done | Not Done | Not Done | 51 | 72 | 87 | Not Done |
| CD36 | 2 | 7 | Not Done | Not Done | Not Done | 63 | Not Det. | 88 | Not Done |
| CD34 | 74 | Not Det. | Not Done | Not Done | Not Done | 0 | 0 | 0 | Not Done |

[0189] Hematopoietic precursors can be identified by their cell-surface marker distribution (Morey & Fleming, 1992; Watt, Gilmore et al., 1987). CD36 is typically found on erythroid progenitor and megakaryocytic cells but appears earlier on cells in the erythroid lineage and has been defined as a marker for erythroid progenitor cells (Okumura, Tsuji et al., 1992b; de Wolf, Muller et al., 1994a). As shown in Table 7, during the maturation of erythroblasts, cells also begin to express CD71, the receptor for transferrin (Migliaccio, Di et al., 2002a), the serum iron-transport protein, and glycophorin A (Migliaccio, Di et al., 2002b). Analysis of the cells surface antigens of our CD34+ selected PBSC indicated an absence of CD36, GpA and most importantly the P antigen, the B19 cellular receptor. In the course of 4 days in culturing in expansion media, cells began to present CD36 on their cell surface and by Day 8, cells were primarily CD36+/GpA+/globoside+, but CD34−. Moreover, the UT7/Epo-S1 cells, the most permissive cellular system for in vitro B19 infection assay (Wong & Brown, 2006d) available at the time of this study, are also primarily CD36⁺/globoside+ and a subpopulation is GpA+.

TABLE 7
Flow cytometry analysis

Cell population

| Surface antigen | CD34+ | CD36+ | UT7/Epo-S1 | K562 |
|---|---|---|---|---|
| Glycophorin A | 0.3 | 63.9 | 26.6 | NT |
| Globoside | 4.7 | 99.1 | 57.6 | NT |
| KU80 | NT | 0.0 | 1.9 | 3.4 |
| CD10 | 0.0 | 0.0 | 0.0 | NT |
| CD19 | 0.1 | 0.0 | 0.0 | NT |
| CD2 | 0.9 | 0.0 | 0.0 | NT |
| CD3 | 0.1 | 0.0 | 0.0 | NT |
| CD33 | 46.2 | 58.6 | 91.3 | NT |
| CD34 | 96.6 | 1.0 | 0.0 | NT |
| CD36 | 11.1 | 97.9 | 99.0 | NT |
| CD44 | 98.9 | 98.0 | 99.0 | NT |
| CD49e + CD29 | 99.0 | 59.0 | 58.8 | NT |
| CD71 | 48-63% | 97.0 | 96.5 | 96 |

*NT means “not tested”

[0190] We were able to generate a pure population of erythroid progenitors from PBSC whereby not only the most of the cells were CD36⁺, but nearly 100% of the cells were CD36⁺/CD34⁻ after culturing for 8 days in expansion media. As a result, the population of cells that was generated did not require further purification by immunomagnetic separation or by other means as typically described. In addition, this modified protocol allowed cells to continue to proliferate for up to 23-26 days after initial induction into the expansion media and the cells did not terminally differentiate into red blood cells. The CD36+ cells appeared to be directed toward terminal differentiation when the cell population reached >2×10⁶/mL without replenishment of fresh media. This may be caused by the depletion of cytokines and growth factors. Following this protocol, we established an in vitro erythropoiesis model from CD34+ hematopoeitic stem cells and generated a population of cells arresting at a specific stage of erythroid differentiation.

[0191] The initial infection study showed a greater amount of B19 transcript production in the CD36+ day 8 cells cultured in the expansion media as compared to CD36+ cells culture in IMDM with IL-3 and EPO and UT7/Epo-S1 cells cultured in the expansion media or in IMDM. CD36+ cells were 2-6% positive at infections using an inoculation at 10e6 ge/mL as compared to UT7/Epo-S1 cells which were able to detect the approximately the same percentage of positive cells at 10e9 ge/mL. (Table 8).

TABLE 8

| | CD36+ in EM | | | CD36+ in IMDM | | | UT7/Epo-S1 in EM | | | UT7/Epo-S1 in IMDM | | |
|---|---|---|---|---|---|---|---|---|---|---|---|---|
| ge/mL | CP/Actin | NS/Actin | IF | CP/Actin | NS/Actin | IF | CP/Actin | NS/Actin | IF | CP/Actin | NS/Actin | IF |
| 10⁹ | 369 | 349 | POS | 1,802 | 2,077 | 2-6% | 150 | 510 | 2-6% | 31 | 52 | 2-6% |
| 10⁸ | 1,428 | 1,902 | POS | 167 | 146 | NEG | 6 | 141 | NEG | 4 | 5 | 1 cell |
| 10⁷ | 2,501 | 4,414 | POS | 7 | 6 | NEG | 0 | 0 | NEG | 1 | 2 | NEG |
| 10⁶ | 85 | 137 | 2-6% | 1 | 0 | NEG | 0 | 0 | NEG | 0 | 0 | NEG |
| No V | 0 | 0 | NEG | N/A | N/A | NEG | 0 | 0 | NEG | 0 | N/A | NEG |

*CP/Actin and NS/Actin given as copies/μL

[0192] Therefore, by immunofluorescence, CD36+ cells were 3-logs more sensitive to infection compared to UT7/Epo-S1 cells. CD36+ cells infected with high titers of B19 seem to be undergoing morphological changes and cell death indicating a cytopathic affect. To determine if B19 affected cell proliferation, UT7/Epo-S1 and CD36+ cells were infected with 10⁷ ge/mL, of B19 and cell proliferation was monitored between the uninfected and infected cells (FIGS. 2a and 2b). CD36+ cells infected with B19 proliferated significantly less than uninfected cells. UT7/Epo-S1 cell proliferation did not seem affected by B19 which is consistent with previous observations.

[0193] CD 36⁺ cells were analyzed for their permissiveness to B19 infection at day 8 and day 15 and shown to have similar transcript production levels (data not shown). Consequently, experiments were conducted using predominantly CD36⁺ day 8 cells as it seemed that cells were differentiated and amply proliferated. We compared the infection assays performed with serial dilutions of virus and analyzed the NS and capsid RNA transcripts at different times post infection. Transcripts can be readily detected at day 3 at a variety of viral inputs as shown in FIGS. 3A and 3B.

[0194] Using the same virus stock as for infection with UT7/Epo cells in determining the sensitivity to B19 infection (Wong & Brown, 2006f), CD36+ cells were able to detect as little as one infectious virus particle in 10e3 viral genome equivalents in plasma sample V1 as compared to UT7/Epo-S1 which detected one infectious virus particle in 10e5 (FIG. 4). In addition, CD36+ cells generally produce 1-2 logs more transcripts than UT7/Epo-S1 cells (FIG. 5A-NS transcripts and FIG. 5B-Capsid transcripts).

[0195] After 8 days of culture in expansion media, cells were analyzed for permissiveness to B19 infection. Permissiveness of the CD36⁺ erythroid progenitor cells for B19 replication was compared to UT7/Epo-S1 cells using qPCR. As shown in Table 9, DNA production was greatest 3 days post infection as detected by qPCR. Compared to UT7/Epo-S1 cells infected with B19 (10 dilution of viral stock having 2×10¹² genomes/ml or 2×10⁸ genomes/ml), there was an approximate 200 fold increase in viral DNA production in CD36⁺ erythroid progenitor cells 3 days post infection (10⁻⁴ dilution of the viral stock).

TABLE 9*

| B19 Dilution | | | | |
|---|---|---|---|---|
| 10⁻³ | 10⁻⁴ | 10⁻⁵ | 10⁻⁶ | 10⁻⁷ |

CD36+ Cells

| | | | | | |
|---|---|---|---|---|---|
| Day | 7,392,250 | 1,087,250 | 115,575 | 14,340 | 1,688 |
| 0 | | | | | |
| Day | 31,870,000 | 1,494,750 | 179,800 | 17,360 | 55,987 |
| 1 | | | | | |
| Day | 261,625,000 | 49,755,000 | 1,777,250 | 165,400 | 6,516 |
| 2 | | | | | |
| Day | 855,600,000 | 4,220,750,000 | 162,450,000 | 2,412,750 | 53,933 |
| 3 | | | | | |

UT7/Epo-S1 Cells

| | | | | | |
|---|---|---|---|---|---|
| Day | 10,527,500 | 1,168,500 | 167,975 | 18,378 | 1,745 |
| 0 | | | | | |
| Day | 18,127,500 | 1,446,250 | 155,825 | 12,973 | 1,835 |
| 1 | | | | | |
| Day | 61,150,000 | 4,532,250 | 559,425 | 24,430 | 7,278 |
| 2 | | | | | |
| Day | 34,982,500 | 19,615,000 | 2,079,000 | 25,683 | 1,782 |
| 3 | | | | | |

•Results in Table 9 are given in qenome equivalents (ge)/μl.

[0196] To compare the viral DNA production between the UT7/Epo-S1 cells and the CD36⁺ cells, serial dilutions of B19 containing plasma were used to infect cells and quantitative PCR (qPCR) was performed. As a result, an increase of viral DNA of up to 3.5 logs over input viral DNA was found in CD36⁺ cells whereas 1 log or less was seen in UT7/Epo-S1 and the greatest increase was seen with inoculation of virus between 10⁷ and 10⁸ ge/mL. Increases in viral DNA production can be seen even with an inoculation of virus at 10⁵ ge/mL (FIG. 6). B19 transcripts can typically be detected in inoculations at 10e3 ge/mL (data not shown).

[0197] NS and capsid transcripts from infected cells were quantitated by RT-PCR. As shown in Table 9, the CD36⁺ erythroid progenitor cells have similar sensitivity to B19 infections as UT7/Epo-S1 cells. As shown in Table 10, NS and capsid transcripts were significantly higher in CD36⁺ erythroid progenitor cells than UT7/Epo-S1 cells 4 hr to 48 hr post infection. The B19 stock in Table 10 had 2×10⁻² genome equivalents (ge)/ml. The results in Table 10 are given in copies/ml.

TABLE 10

| Hours post | CD36⁺ Erythroid | | | |
|---|---|---|---|---|
| B19 | Progenitor Cells | | UT7/Epo-S1 Cells | |
| infection | NS | CP | NS | CP |
| NoV | 1 | 0 | 4 | None Detected |
| 0 | 521 | 100 | 422 | 116 |
| 2 | 30 | 4 | 74 | 13 |
| 4 | 44,670 | 2,080 | 2,759 | 182 |
| 6 | 113,800 | 4,549 | 13,655 | 393 |
| 12 | 4,961,000 | 670,650 | 354,800 | 2,182 |
| 24 | 197,100,000 | 184,800,000 | 1,853,500 | 637,450 |
| 48 | 155,400,000 | 141,700,000 | 21,150,000 | 20,345,000 |

Transcripts corresponding to actin indicated the similar numbers of CD36⁺ erythroid progenitor cells and UT7/Epo-S1 cells were assayed (data not shown).

[0198] To confirm cells infected with parvovirus B19 were producing infectious virus particles, naïve CD36⁺ erythroid progenitor cells were infected with supernatants from infected CD36⁺ erythroid progenitor cells. The naïve cells were incubated with the supernatants (initial MOI of 100) for 2 hr and then washed with expansion media and incubated as described above. At day 0 to 3 post infection, capsid RNA transcripts were detected in the naïve cells infected with supernatants. As shown in Table 11, a small number of viral genomes (approximately 370 to 390 genomes/μl) were detected in the supernatants of the infected naive cells at day 0 and day 1 post infection. These genomes likely represent virus carried over from the washing step or virus particles that have detached from the surface of the naïve cells. The number of genomes and capsid transcripts detected in supernatant harvested at day 0 and day 1 post infection also indicate the genomes likely represent virus particles that were non-infectious. At day 2 post infection, genomes/μl supernatant was approximately 25 fold greater than at day 0 or 1. At day 2 post infection, capsid transcripts/μl supernatant was approximately 300 fold greater than at day 0 or 1. At day 3 post infection, genomes/μl supernatant was approximately 350 fold greater than at day 0 or 1. At day 3 post infection, capsid transcripts/μl supernatant was approximately 450 fold greater than at day 0 or 1. The data shown in Table 11 indicated parvovirus B19 virus particles produced by the CD36⁺ erythroid progenitors cells was infectious.

TABLE 11

| | Approximate viral | | CP transcripts | CP transcripts |
|---|---|---|---|---|
| Day of | genomes detected | | detected on | detected on |
| supernatant | in supernatants | | Day 0 | Day 3 |
| harvest | (ge/mL) | MOI | (copies/mL) | (copies/mL) |
| Day 0 | 391 | 2 | ND | ND |
| Day 1 | 373 | 2 | ND | 9 |
| Day 2 | 10,500 | 52 | ND | 2,953 |
| Day 3 | 135,500 | 678 | 10 | 4,498 |

*ND means “not detected”

[0199] To demonstrate that the viral B19 DNA generated by infections with viremic plasma produced infectious particles, lysates of B19 infected CD36+ cells were used in two rounds of sequential infections. Infected cell lysates were freeze-thawed three times and clarified by centrifugation and applied directly or in serial dilutions to naïve cells. Cells were shown to produce 1-2 logs more infectious virus in two successive rounds of infection with lysates from infected cells. (FIG. 7).

[0200] Expansion of CD133+ cells behave similarly to CD34+ cells. CD133⁺ cells culture in expansion media proliferate at a rate comparable to CD34⁺, increasing >1.8 logs within 8 days of culture (FIG. 11). Cells are also equally sensitive to B19 infection as seen in the immunofluorescence assay using the same assay for immunofluorescence with murine anti-B19 capsid protein monoclonal antibody 521-5D as the primary antibody and fluorescein isothiocyanate (FITC)-labeled goat anti-mouse IgG & IgM antibody as the secondary antibody. (FIG. 12A). The erythroid cells derived from CD133+ cells are CD36+, and have globoside. In appearance, the cells are similar to those derived from CD34+.

[0201] This methodology of production of CD36⁺ cells offers a better cellular system for in vitro infection assays with Parvovirus B19 as these cells are true erythroid progenitors. Moreover it is a flexible method, since it is adaptable to CD34⁺ cells, Cd133+, or other hematopoeitic stem cells obtained from different sources such as bone marrow, PBMC, PBSC, or cord blood. The CD36+ cells derived from this culture system were able to support viral infection and replication to a much higher degree than UT7/Epo-S1 cells, having a greater sensitivity of 2 logs detecting inoculations at 10e3 ge/mL and >3 log increase in viral DNA production.

[0202] When we looked for the capsid proteins by IF, we obtained 3 logs more sensitivity at 10e6 ge/mL in the CD36⁺ cells in comparison to the UT7/Epo-S1. Cells continue to be permissive to B19 infections at least up to D15 allowing for flexibility to work with these cells. In successive rounds of infections with lysates from infected cells, we can show that this system does produce infectious virus. We observed 1-2 log increases in viral DNA production in successive rounds of infection. B19 has been known to generate approximately 1 infectious unit in 10e3 to 10e5 genomes detected (Bonvicini, Gallinella et al., 2004), this may explain the decrease of viral DNA output among the second and third round infections compared to the initial round of infection.

[0203] With optimal transfection conditions, CD36⁺ cells transfected with the infectious clone pB19-M20 produced detectable infectious virus. This offers another potential source of infectious B19 virus and removes the dependency on viremic serum as an initial source of virus. Until now, the most reliable source of large amounts of B19 virus was phlebotomy of viremic donors and methods for consistently producing infectious B19 in a significant quantity in cell culture have been limited. Now with the ability to generate large scale numbers of cells highly permissive to B19 infection and a highly productive infection, we have cells capable of producing useful amounts of B19. Infectious virus is useful for identifying and developing therapeutically effective compositions for treatment and/or prevention of human parvovirus B19 infections, such as for example, antibodies, attenuated vaccines, and chimeric viral capsid proteins comprising antigenic epitopes.

### Example 2

### Transfection of CD36⁺Erythroid Progenitor Cells with an Infectious Parvovirus B19 Clone and Detection of Replicative Forms of Parvovirus B19 in the Transfected Cells

[0204] To determine if B19 could replicate in CD36⁺ erythroid progenitor cells, we used RT-PCR or qRT-PCR to detect transcripts for viral capsids in RNA recovered from transfected cells. The presence or absence of B19 capsid proteins was detected via immunofluorescent microscopy. By these experimental methods, the presence, transcription, and expression of the capsid gene could be confirmed.

### Methods

[0205] The conditions and reagents for transfecting plasmid DNA into CD36⁺ erythroid progenitor cells were first optimized using the plasmid pEGFP-F (BD Biosciences, Palo Alto, Calif.) that encodes farnesylated enhanced green fluorescent protein (EGFP). Cells were examined at daily intervals for expression of EGFP by UV microscopy and by FACS analysis. Conditions that gave the maximum number of cells expressing EGFP with minimum cytotoxicity were chosen. Such conditions are shown in Table 12 and are commercially available.

TABLE 12

| | | Nucleofector | |
|---|---|---|---|
| Cells | DNA | Reagent | Program |
| UT7/Epo-S1 | pEGFP/pB19-M20 | R | T-20 |
| CD36⁺ | pEGFP/pB19-M20 | R | T-20 |
| CD36⁺ | pEGFP/pB19-M20 | R | V-001 |
| CD36⁺ | pEGFP/pB19-M20 | V | T-19 |
| CD36⁺ | pEGFP/pB19-M20 | CD34 Prog. Cells | U-08 |
| CD36⁺ | pEGFP/pB19-M20 | Monocytic Cells | Y-001 |

[0206] For subsequent experiments, CD36⁺ erythroid progenitor cells were transfected after 8 days of culture in expansion medium using the AMAXA® Cell Line Nucleofector™ reagent V and program T19 according to the manufacturer's instructions (AMAXA Biosystems Inc., Nattermannallee, Germany). UT7/EPO-S1 cells were transfected using the AMAXA® Cell Line Nucleofector™ (reagent R and program T20 according to the manufacturer's instructions (Zhi et al., 2004, Virology, 318:142-152).

[0207] After day 8 in expansion media, 2×10⁶ CD36⁺ erythroid progenitor cells were transfected with 2 pg of plasmid pB19-M20 cut with SalI enzyme, which releases the full-length B19 genome from the plasmid (Zhi et al., 2004, Virology, 318:142-152). The percentage of mortality is higher (two times) than that observed in the UT7/Epo-S1 perhaps because the CD36⁺ cells are a primary culture type and not a cell line. Both the viability and the extent of positivity of the expression of GFP depend on the day of culture in which the transfection was performed. When the CD36⁺ cells are transfected at day 8 in expansion medium (confluence at 3×10⁵/ml), between 14% and 26% are positive for EGFP (depending on the condition used). When the cells are transfected at day 13 in expansion medium, we observed that the largest number of positive cells is with the monocyte kit, in contrast to day 8 and 10. Only 9% of CD36⁺ cells transfected at day 14 in expansion media is positive at the expression of GFP.

[0208] The CD36⁺ cells transfected with the infectious clone pB19-M20 with the different conditions were tested by IF after 48 hours post transfection. The best result was achieved with the condition Reagent V and Program T19, in which up to 50% of cells were positive by IF using antibody (521-5D) to the B19 capsid protein, where the Reagent R and Program T20 show a 40% of positivity and reagent for CD34 Progenitors and Monocytic cells around 10%. In comparing, transfection of CD36+ cells to UT7/Epo-S1 cells, the number of positive cells by IF after transfection with pB19-M20 is 10 times more in Cd36+ cells than observed with the UT7/Epo-S1 cells.

[0209] The cells were incubated for 72 hours post transfection, and then washed free of inoculum using fresh culture medium, and cell lysates prepared by three cycles of freeze/thawing. After centrifugation at 10,000 g for 10 min, the clarified supernatant was treated with RNase (final concentration of 1 U/μl, Roche Applied Science, Indianapolis, Ind.) and collected for further infections. The UT7/Epo-S1 cells were transfected with plasmid pB19-M20 as described in Zhi et al., 2004, Virology, 318:142-152.

[0210] Total RNA was extracted from the CD36⁺ erythroid progenitor cells UT7/Epo-S1 cells using RNA STAT-60™ (Tel-Test Inc., Friendswood, Tex.). Residual DNA was removed by DNAse I treatment (final concentration, 90 U/ml) for 15 min at room temperature. RNA was converted to cDNA with random primers and SuperScript™ II (Invitrogen), and RT-PCR for the spliced capsid transcripts was performed with primers B19-1 (5′GTTTTTTGTGAGCTAACTA3′; SEQ ID NO:321) and B19-9 (5′CCACGATGCAAGCTACAACTT3′; SEQ ID NO:322) as described in Nguyen et al., 2002, Virology, 301:374-380.

[0211] If required, mRNA was extracted from cells using a mRNA capture method (Qiagen Turbocapture) and directly reverse transcribed using M-MLV reverse transcriptase.

[0212] Transfected cells were cytocentrifuged (1500 rpm for 8 min in a Shandon cytospin 4 cytocentrifuge). The cells were fixed in acetone:methanol (1:1) at −20° C. for 5 min, washed twice in phosphate buffered saline (PBS) containing 0.1% fetal bovine serum, and incubated with a murine anti-B19 capsid protein monoclonal antibody (521-5D, gift of Larry Anderson, CDC) in PBS with 10% fetal calf serum for 1 hr at 37° C. After washing the slides twice in PBS, the slides were incubated with fluorescein isothiocyanate (FITC)-labeled goat anti-mouse IgG antibody (Jackson ImmunoResearch Laboratories, Inc., West Grove, Pa.) in PBS with 10% fetal calf serum and counterstained with Evans Blue for 30 mins at 37° C., washed in PBS, and examined by UV microscopy.

[0213] CD36⁺ day 8 cells proved to be the optimal day of expansion for cells to be transfected with pB19-M20 using the Nucleofection Amaxa System Reagent V and Program T19. Lysates from cells transfected with 2 μg of insert DNA, corresponding to the full-length genome of B19, or 5 μg of the whole plasmid pB19-M20 were used to infect naïve cells. For comparison, the same experiment was carried out using UT7/Epo-S1, following its optimized protocol (Reagent R and program T-20) for transfection with pB19-M20. CD36⁺ cells were infected with virus from viremic plasma as a positive control. As mentioned above, the transfection efficiency of pB19-M20 is much higher for CD36⁺ cells in comparison to UT7/Epo-S1 cells. Moreover, if we infect CD36⁺ cells at day 8 with the cell lysate from CD36⁺ transfected cells and assayed by qRT-PCR, infectious progeny efficiently infect naïve cells, detecting a >1.5 log increase in transcript production (FIG. 8). Using our RT-PCR method (Nguyen, Wong et al., 2002), viral mature RNA transcripts from infected cells are amplified as two alternatively spliced PCR products which are separated by gel electrophoresis and confirmed by southern hybridization analysis. RNA transcripts can be detected in transfected CD36⁺ cells and also were detected at day 3 post infection. We observed a number between 5 and 45 positive cells in IF, while we are not able to see positive cells in UT7/Epo-S1. (FIG. 12B).

### Results

[0214] The plasmid pEGFP-F was used to optimize the conditions for transfecting CD36⁺ erythroid progenitor cells. Although standard electroporation and liposomes were also tried, the best results were obtained using the AMAXA® Cell Line Nucleofector System™. The highest transfection efficiency (50%) with minimum cytotoxicity was achieved with reagent V and program T19 using 2 μg pEGFP DNA and 2×10⁶ CD36⁺ erythroid progenitor cells, following the manufacturer's instructions (AMAXA Biosystems Inc., Cologne, Germany).

[0215] CD36⁺ erythroid progenitor cells were transfected with plasmid pB19-M20 under the same conditions, and harvested at 72 h post-transfection. The RT-PCR and immunofluorescence assay were performed to detect viral spliced transcripts for capsid proteins or capsid proteins, respectively. After RT-PCR, two amplicons of 253 bp and 133 bp, representing the alternative spliced transcripts of B19 capsid gene, were detected in the cells transfected with pB19-M20 (data not shown). By immunofluorescence assay, B19 capsid protein was also detected in the transfected CD36⁺ erythroid progenitor cells, with approximately 50% of the cells having a positive signal when transfected with pB19-M20. The number CD36⁺ erythroid progenitor cells positive for B19 capsid protein was approximately 10 times greater than the number of UT7/Epo-S1 cells positive for the capsid protein. A greater than 1.5 log increase in infectious virus production was observed following transfection of CD36⁺ erythroid progenitor cells compared to transfection of UT7/Epo-S1 cells.

### Example 3

### Transfected CD36⁺Erythroid Progenitor Cells Produce B19 Infectious Virus

[0216] To determine if infectious virus were generated from the CD36⁺ erythroid progenitor cells transfected with pB19-M20, the cells were tested for B19 capsid expression by immunofluorescence and RNA extracted from cell lysates was tested for the transcripts of viral capsid or NS proteins by RT-PCR or qRT-PCR.

### Methods

[0217] For infection studies, 2×10⁴ of CD36⁺ erythroid progenitor cells in 10 μl of expansion medium were mixed with an equal volume of sample or positive control viral stock (J35 serum diluted to contain 10⁸ B19 genome copies) and incubated at 4° C. for 2 h to allow for maximum virus-cell interaction. The cells were then diluted to 2×10⁴ cells/0.1 ml or scaled up proportionately in the culture medium, and incubated at 37° C., in 5% CO₂. At 0-5 days post infection, cells were tested for evidence of infection by detection of viral transcripts and protein expression. To determine if infectious virus were generated from the CD36⁺ erythroid progenitor cells or UT7/Epo-S1 cells transfected with pB19-M20, the cells were assayed for B19 capsid expression by immunofluorescence as described above and the cell lysates was tested for the transcripts of viral capsid or NS protein genes by RT-PCR or qRT-pCR as described above. B19 infected CD36⁺ erythroid progenitor cells and UT7/Epo-S1 cells were used as a positive control.

### Results

[0218] The infected cultures were examined for the production of parvovirus B19 capsid proteins. At 72 h post-inoculation, capsid proteins could be detected in the nuclei and cytoplasm of cells with the supernatants derived from either B19 infection or pB19-M20 transfection.

### Example 4

### Transformation of CD36⁺ Erythroid Progenitor Cells with SV40 Large-T Antigen

[0219] The CD36⁺ erythroid progenitor cells in culture have a life span of about 20-23 days. In order to provide a consistent source of the CD36⁺ erythroid progenitor cells, we infected the cells with a viral vector encoding SV40 large-T antigen to extend the life span and replicative capacity of the CD36⁺ erythroid progenitor cell. Other viral vectors have also be used including: Lentivirus containing SV40 T-antigen; Lentivirus containing SV40 T-antigen plus a lentivirus containing hTERT (human telomerase reverse transcriptase gene); infection with EBV (Epstein-Barr virus); and a lentiviral vector containing the human papilloma virus (HPV) type 16 E6/E7 gene. Numerous plasmid and viral vectors are available commercially.

### Methods

[0220] The CD36⁺ erythroid progenitor cells were produced from CD34⁺ hematopoietic stem cells and cultured as described in Example 1. At day 8 of culture in the expansion media, 1.4×10⁷ cells were infected with 100 μl of recombinant adenovirus-SV40 (approximately 3×10⁸ PFU/ml; Gluzman et al., 1980, Proc. Natl. Acad. Sci. U.S.A., 77:3898-3902). The cells were incubated for 1 hr at 34° C., washed with expansion media, and resuspended in 10 ml expansion media. DNA and RNA analysis was performed as described in Example 1. Immunofluorescence and FACs analysis was performed as described in Example 1.

### Results

[0221] Similar to the culture of the CD36⁺ erythroid progenitor cells, the adenoviral-SV40 transformed CD36⁺ erythroid progenitor cells were non-enucleated and in some cases, visibly red, indicating the presence of hemoglobin. The CD36⁺ erythroid progenitor cells in culture had a life span of about 21 to 26 days. In contrast, the adenoviral-SV40 transformed CD36⁺ erythroid progenitor cells had a life span of about 25 to 30 days. FACs analysis of the transformed cells indicated that 1.23% of the cells were positive for CD34 and 99% of the cells were positive for CD36. CD19, CD3, and CD2 are cell surface markers for lymphocytes cells and can be used to distinguish erythroid progenitor cells from lymphoid lineage cells. CD44 is a cell surface marker for leukocytes and erythrocytes. FACs analysis indicated the transformed cells were CD44⁺, CD19⁻, CD10⁻, CD4⁻, CD3⁻, and CDT. A comparison of the surface antigens on the adenoviral-SV40 transformed CD36⁺ erythroid progenitor cells, CD34⁺ cells, CD36⁻ erythroid progenitor cells, and UT7/Epo-S1 cells is shown in Table 13.

TABLE 13

| | Cell Population (Percentage of cells | | | |
|---|---|---|---|---|
| | positive for surface marker) | | | |
| Surface | | | Transformed | |
| Antigen | CD34⁺ | CD36⁺ | CD36⁺ | UT7/Epo-S1 |
| Glycophorin A | 0.3 | 63.9 | NT | 26.6 |
| CD10 | 0.0 | 0.0 | 0.0 | 0.0 |
| CD19 | 0.1 | 0.0 | 0.0 | 0.0 |
| CD2 | 0.9 | 0.0 | 0.0 | 0.0 |
| CD3 | 0.1 | 0.0 | 0.0 | 0.0 |
| CD33 | 46.2 | 58.6 | 29.6 | 91.3 |
| CD34 | 96.6 | 1.0 | 0.0 | 0.0 |
| CD36 | 11.1 | 97.9 | 98.1 | 99.4 |
| CD44 | 98.9 | 98.0 | 98.2 | 99.7 |

*NT “means not tested”

[0222] On Day 22 of culture in the expansion media (14 days post-transformation), the transformed CD36⁺ erythroid progenitor cells were infected with B19 as described in Example 1. The increase in B19 DNA was assayed by qPCR 3 days post infection. The transformed CD36⁺ cells are more sensitive to B19 infection than the non-transformed CD36⁺ cells (FIG. 9). Maximal virus output was observed with an input of 20,000 genomes/μl (ge/μl). An input of 200,000 ge/μl or 2,000,000 ge/μl into non-transformed CD36⁺ erythroid progenitors produced about the same output of virus observed for an input of 20,000 ge/μl.

[0223] B19 capsid protein in CD34⁺ cells, primary CD36⁻ cells, adenovirus-SV40 transformed CD36⁺ cells, CD36⁺ K562 cells and UT7/Epo-S1 cells was assayed by immunofluoresence 3 days post infection with B19. As shown in Table 14, at an multiplicity of Infection (MOI-ratio of virus to cells) of 10,000, the percent of adenovirus-SV40 transformed CD36⁺ erythroid progenitor cells positive for B19 capsid protein is approximately 2.5 fold greater than non-transformed CD36⁺ cells and approximately 23 fold greater than UT7/Epo-S1 cells.

TABLE 14

| | CD34* cells | Non- | Ad-SV40 | | |
|---|---|---|---|---|---|
| | (before | transformed | Transformed | | |
| MOI | differentiation) | CD36⁺ cells | CD36⁺ cells | K562/CD36+ | UT7/Epo-S1 |
| 100,000 | Neg | 14% | NT | NT | 4% |
| 10,000 | Neg | 9% | 23% | Neg | 1% |
| 1,000 | Neg | Pos | 15% | NT | Pos/neg |
| 100 | NT | Pos | 4% | NT | Pos/neg |
| 10 | NT | Pos | ~2% | NT | NT |
| 1 | NT | Pos | <1% | NT | NT |
| 0.1 | NT | Neg | <1% | NT | NT |
| 0.01 | NT | Neg | <1% | NT | NT |

*NT means not tested

[0224] NS transcripts from transfected CD36⁺ cells infected with B19 were quantitated by qRT-PCR. As shown in FIG. 10, CD36+ cells were infected with B19 and an increase in B19 NS transcripts was detected in all concentrations of input virus, in particular, a 2-3 log increase at some concentrations. The maximum number of B19 NS transcripts was observed 3 days post-infection with 10,000 genome copies/μl of virus.

### Example 5

### Microarray Expression Data

[0225] Using microarray technology, we have conducted time course studies which follow viral infection in CD36⁺ cells. We have also studied changes in gene expression as cells differentiate to permissivity for B19 infection.

[0226] Methods

[0227] CD36+ cells at a concentration of 2×10e5 cells/ml were infected with 10e9 B19 ge/mL. At various timepoints, cells were collected and RNA extracted using the Qiagen RNeasy micro kit. Hybridization cocktails for microarray analysis in Affymetrix GeneChips were produced following AffyMetrix's protocols.

[0228] Results

[0229] In this study, CD36+ cells were infected with B19 parvovirus and the samples collected at 0, 3, 6, 12, 24 and 48 h. The change in host cell gene expression induced by B19 infection was analyzed using Affymetrix GeneChip human arrays. A total of 7361 Genes were differentially (5-fold up or down) expressed during the progression of B19 infection (data not shown). We analyzed a total of 309 genes that were differentially expressed (more than 2-fold up or down and statistically significant using a FDR of 0.05) during B19 infection. In the early phase of infection (0, 3 and 6 h) a majority of differentially expressed genes were upregulated, and the genes were mainly involved in cytoskeleton remodeling, chemokines and/or adhesion molecules. In particular, the expression level of actin together with several proteins (alpha-actin, ACTR3/2, filamin A, and talin) associated with actin filaments were upregulated during the early phase of B19 infection. In addition, several critical factors (calmodulin, IP3R, PKC, and PKA) in calcium signaling also were targeted. In contrast, most differentially regulated genes declined during late phase infection (24 and 48 h) and were involved in growth arrest, cell metabolism, immune response, and apoptosis. The expression level of genes in the cyclosome/anaphase-promoting complex, a multisubunit E3 ubiquitin ligase targeting cell-cycle-related proteins, were significantly down regulated during the late phase of infection. Our data indicate that parvovirus B19 primarily targets cellular genes involved in cell architecture, cell-cycle regulation (FIG. 13), and calcium signaling.

[0230] The results in Table 15 show differential gene expression of genes expressed in B19 infected CD36+ cells. The genes shown had about a 2-fold difference from the expression at timepoint 0 (control). The change in expression level is shown at different time points post infection. The column showing upregulation or down regulation was determined by comparing expression levels at 48 hours compared to the 0 timepoint.

| | | | Hours Post-Infection | | | | | | 6 hr | 48 hr | SEQ ID |
|---|---|---|---|---|---|---|---|---|---|---|---|
| Probe set | Gene | GI # | 0 | 3 | 6 | 12 | 24 | 48 | Change | Change | NO |
| 213975_s_at | | 10731210 | 12.77 | 6.68 | 1.76 | 3.13 | 1.57 | 5.34 | down | down | 1 |
| 206207_at | LGALS10; | 20357558 | 2.84 | 2.64 | 1.41 | 2.35 | 1.46 | 4.35 | down | up | 2 |
| | MGC149659; | | | | | | | | | | |
| | LPPL_HUMAN | | | | | | | | | | |
| 219992_at | NKB; NKNB; | 55775470 | 1.04 | 0.89 | 1.01 | 0.74 | 0.96 | 3.92 | down | up | 3 |
| | PRO1155; | | | | | | | | | | |
| | ZNEUROK1 | | | | | | | | | | |
| 202437_s_at | NKB; NKNB; | 13325059 | 0.78 | 0.88 | 1.45 | 1.12 | 1.58 | 3.83 | up | up | 4 |
| | PRO1155; | | | | | | | | | | |
| | ZNEUROK1 | | | | | | | | | | |
| 206871_at | NE; HLE; HNE; | 58530849 | 8.71 | 5.49 | 1.83 | 2.92 | 1.34 | 3.64 | down | down | 5 |
| | PMN-E | | | | | | | | | | |
| 203949_at | IL6 | 4557758 | 6.12 | 4.00 | 1.79 | 2.82 | 1.55 | 3.21 | down | down | 6 |
| 203948_s_at | IL6 | 189039 | 6.74 | 3.76 | 1.56 | 2.51 | 1.15 | 3.12 | down | down | 7 |
| 202436_s_at | CYP1B1 | 11006376 | 1.23 | 0.83 | 1.66 | 1.29 | 1.57 | 3.12 | up | up | 8 |
| 205624_at | CDH13 | 4503000 | 2.99 | 2.39 | 1.33 | 1.68 | 1.17 | 2.95 | down | down | 9 |
| 200974_at | ACTSA | 4501882 | 1.16 | 1.12 | 1.10 | 1.09 | 1.71 | 2.94 | down | up | 10 |
| 200771_at | LAMB2; | 145309325 | 1.34 | 1.10 | 1.42 | 0.99 | 1.66 | 2.74 | up | up | 11 |
| | MGC87297 | | | | | | | | | | |
| AFFX- | | AFFX- | 1.22 | 1.01 | 1.10 | 1.01 | 1.09 | 2.71 | down | up | |
| M27830_M_at | | M27830_M | | | | | | | | | |
| 211734_s_at | FCE1A; | 13543505 | 3.40 | 2.14 | 1.30 | 2.05 | 1.30 | 2.71 | down | down | 12 |
| | FcERI | | | | | | | | | | |
| 201426_s_at | VIM | 5658563 | 3.11 | 2.30 | 0.92 | 1.82 | 0.99 | 2.70 | down | down | 13 |
| 202435_s_at | | 11016025 | 1.00 | 0.91 | 1.31 | 1.30 | 1.34 | 2.58 | up | up | 14 |
| AFFX- | | AFFX-M27830_5 | 0.83 | 1.06 | 1.27 | 1.09 | 1.05 | 2.55 | up | up | |
| M27830_5_at | | | | | | | | | | | |
| 219892_at | CCNC | 141803413 | 1.19 | 1.32 | 1.16 | 0.97 | 1.45 | 2.48 | down | up | 15 |
| 211005_at | LAT1; | 2828025 | 2.54 | 1.16 | 1.18 | 1.50 | 1.16 | 2.34 | down | down | 16 |
| | pp36 | | | | | | | | | | |
| 202662_s_at | IP3R2 | 95147334 | 1.04 | 1.17 | 1.02 | 1.24 | 1.39 | 2.25 | down | up | 17 |
| 205942_s_at | SA; SAH | 47458816 | 0.99 | 1.13 | 0.98 | 1.22 | 1.11 | 2.18 | down | up | 18 |
| 209795_at | CLEC2C | 291897 | 3.83 | 1.01 | 1.31 | 1.09 | 1.38 | 2.11 | down | down | 19 |
| 218788_s_at | ZMYND1; | 12232400 | 0.93 | 1.13 | 1.10 | 1.11 | 1.37 | 2.08 | up | up | 20 |
| | ZNFN3A1; | | | | | | | | | | |
| | FLJ21080; | | | | | | | | | | |
| | MGC104324; | | | | | | | | | | |
| | bA74P14.1 | | | | | | | | | | |
| 204802_at | RAD; RAD1; | 4759053 | 0.67 | 1.00 | 1.00 | 0.97 | 1.25 | 2.07 | up | up | 21 |
| | REM3 | | | | | | | | | | |
| 214575_s_at | AZU; HBP; | 28416954 | 5.04 | 3.50 | 1.38 | 2.34 | 1.25 | 2.05 | down | down | 22 |
| | NAZC; AZAMP; | | | | | | | | | | |
| | CAP37; | | | | | | | | | | |
| | HUMAZUR | | | | | | | | | | |
| 207813_s_at | ADXR | 111118982 | 0.85 | 1.00 | 0.86 | 1.07 | 1.23 | 2.00 | up | up | 23 |
| 207957_s_at | PKCB; PRKCB; | 47157320 | 2.12 | 1.05 | 0.97 | 1.23 | 1.37 | 2.00 | down | down | 24 |
| | PRKCB2; | | | | | | | | | | |
| | MGC41878; | | | | | | | | | | |
| | PKC-beta | | | | | | | | | | |
| 205780_at | BP4; | 21536418 | 0.94 | 0.83 | 1.16 | 0.95 | 1.26 | 1.93 | up | up | 25 |
| | NBK; | | | | | | | | | | |
| | BIP1 | | | | | | | | | | |
| 210886_x_at | P53TG1; | 5006270 | 0.79 | 1.11 | 0.99 | 1.20 | 1.27 | 1.93 | up | up | 26 |
| | TP53TG1; | | | | | | | | | | |
| | P53TG1-D; | | | | | | | | | | |
| | H_RG012D21.9; | | | | | | | | | | |
| | TP53 target | | | | | | | | | | |
| | gene 1 | | | | | | | | | | |
| 219763_at | FAM31A; | 55749788 | 0.82 | 1.01 | 1.20 | 1.02 | 1.49 | 1.93 | up | up | 27 |
| | FLJ38464; | | | | | | | | | | |
| | KIAA1608; | | | | | | | | | | |
| | RP11-230L22.3 | | | | | | | | | | |
| 212099_at | GRB2 | 3872112 | 2.40 | 0.80 | 1.29 | 1.24 | 0.93 | 1.92 | down | down | 28 |
| 202890_at | MAP7 | 6576051 | 0.94 | 1.19 | 1.01 | 1.07 | 1.29 | 1.91 | up | up | 29 |
| 205229_s_at | COCH | 2630835 | 0.56 | 0.87 | 1.22 | 1.02 | 1.07 | 1.90 | up | up | 30 |
| 213107_at | | 829788 | 0.92 | 0.88 | 1.33 | 0.84 | 1.14 | 1.86 | up | up | 31 |
| 203471_s_at | P47; | 4505878 | 2.72 | 1.38 | 1.22 | 1.36 | 1.14 | 1.86 | down | down | 32 |
| | FLJ27168 | | | | | | | | | | |
| 202766_s_at | FBN; SGS; | 93589095 | 0.65 | 0.80 | 1.21 | 0.97 | 1.48 | 1.86 | up | up | 33 |
| | WMS; MASS; | | | | | | | | | | |
| | MFS1; OCTD | | | | | | | | | | |
| 203381_s_at | TOMM40 | 1153408 | 3.37 | 1.71 | 0.96 | 1.40 | 0.98 | 1.85 | down | down | 34 |
| 209881_s_at | LAT1; | 2828023 | 2.73 | 1.46 | 1.11 | 1.42 | 1.24 | 1.84 | down | down | 35 |
| | pp36 | | | | | | | | | | |
| 208894_at | HLA- | 188255 | 3.25 | 2.81 | 1.14 | 1.79 | 1.04 | 1.81 | down | down | 36 |
| | DRA1 | | | | | | | | | | |
| AFFX-r2-Bs-lys- | | AFFX-r2-Bs-lys-3 | 0.85 | 1.09 | 1.09 | 0.88 | 0.88 | 1.81 | up | up | |
| 3_at | | | | | | | | | | | |
| 217763_s_at | Rab22B | 33589860 | 0.89 | 1.06 | 1.03 | 1.20 | 1.23 | 1.80 | up | up | 37 |
| 201631_s_at | DIF2; IEX1; | 119964722 | 2.23 | 1.15 | 1.58 | 1.15 | 0.97 | 1.80 | down | down | 38 |
| | PRG1; DIF-2; | | | | | | | | | | |
| | GLY96; IEX-1; | | | | | | | | | | |
| | IEX-1L | | | | | | | | | | |
| 209685_s_at | PKCB; PRKCB; | 189968 | 2.22 | 1.51 | 0.94 | 1.35 | 1.34 | 1.79 | down | down | 39 |
| | PRKCB2; | | | | | | | | | | |
| | MGC41878; | | | | | | | | | | |
| | PKC-beta | | | | | | | | | | |
| 215785_s_at | PIR121 | 7328000 | 2.10 | 1.04 | 1.13 | 1.13 | 1.21 | 1.76 | down | down | 40 |
| 200644_at | F52; MLP; | 32401423 | 0.72 | 0.92 | 1.02 | 1.00 | 1.28 | 1.75 | up | up | 41 |
| | MRP; MLP1; | | | | | | | | | | |
| | MACMARCKS | | | | | | | | | | |
| 204174_at | FLAP | 15718674 | 2.92 | 2.15 | 1.30 | 1.39 | 1.15 | 1.74 | down | down | 42 |
| 210254_at | HTM4; | 561638 | 2.85 | 2.01 | 1.35 | 2.37 | 1.38 | 1.74 | down | down | 43 |
| | CD20L | | | | | | | | | | |
| 207067_s_at | HDC | 92110054 | 2.83 | 2.26 | 1.28 | 1.52 | 1.10 | 1.73 | down | down | 44 |
| 212224_at | ALDC; ALDH1; | 25777722 | 0.70 | 0.98 | 1.15 | 1.06 | 1.13 | 1.71 | up | up | 45 |
| | PUMB1; | | | | | | | | | | |
| | ALDH11; | | | | | | | | | | |
| | RALDH1; | | | | | | | | | | |
| | ALDH-E1; | | | | | | | | | | |
| | MGC2318 | | | | | | | | | | |
| 213142_x_at | TERF2IP | 10302386 | 0.72 | 1.00 | 1.18 | 0.85 | 1.50 | 1.71 | up | up | 46 |
| 209083_at | p57; TACO; | 1002922 | 2.02 | 1.31 | 0.80 | 1.36 | 1.00 | 1.71 | down | down | 47 |
| | CLABP; | | | | | | | | | | |
| | HCORO1; | | | | | | | | | | |
| | CLIPINA; | | | | | | | | | | |
| | FLJ41407; | | | | | | | | | | |
| | MGC117380 | | | | | | | | | | |
| 209803_s_at | IPL; BRW1C; | 2150049 | 1.61 | 0.79 | 1.26 | 0.95 | 1.30 | 1.68 | down | up | 48 |
| | BWR1C; | | | | | | | | | | |
| | HLDA2; TSSC3 | | | | | | | | | | |
| 218711_s_at | SDR; PS- | 66346738 | 1.85 | 1.23 | 0.89 | 1.51 | 1.14 | 1.67 | down | down | 49 |
| | p68 | | | | | | | | | | |
| 204803_s_at | RAD; RAD1; | 4759053 | 0.59 | 0.77 | 1.22 | 0.97 | 0.99 | 1.66 | up | up | 50 |
| | REM3 | | | | | | | | | | |
| 206023_at | NMU | 5729946 | 0.60 | 0.65 | 1.13 | 0.88 | 1.16 | 1.64 | up | up | 51 |
| 218924_s_at | CTB | 4758091 | 0.77 | 1.11 | 1.18 | 0.92 | 1.06 | 1.63 | up | up | 52 |
| 34210_at | | 1444193 | 2.97 | 1.76 | 1.05 | 1.37 | 1.23 | 1.63 | down | down | 53 |
| 210609_s_at | PIG3 | 33875490 | 0.76 | 0.77 | 1.13 | 0.94 | 1.20 | 1.63 | up | up | 54 |
| 201850_at | MCP; | 63252912 | 4.01 | 2.21 | 1.34 | 1.94 | 1.17 | 1.61 | down | down | 55 |
| | AFCP | | | | | | | | | | |
| 214453_s_at | p44; | 141802167 | 0.96 | 1.07 | 1.60 | 2.12 | 1.48 | 1.60 | up | up | 56 |
| | MTAP44 | | | | | | | | | | |
| 210982_s_at | HLA- | 188268 | 2.47 | 2.73 | 1.02 | 1.43 | 0.97 | 1.59 | down | down | 57 |
| | DRA1 | | | | | | | | | | |
| 201373_at | HD1; PCN; | 47607491 | 1.69 | 1.09 | 0.82 | 1.20 | 1.05 | 1.58 | down | down | 58 |
| | EBS1; EBSO; | | | | | | | | | | |
| | PLTN; PLEC1b | | | | | | | | | | |
| 209312_x_at | DRB1; HLA | 5478215 | 2.28 | 1.59 | 1.32 | 1.59 | 1.09 | 1.58 | down | down | 59 |
| | DRB1; HLA- | | | | | | | | | | |
| | DR1B | | | | | | | | | | |
| 202071_at | SYND4; | 38201674 | 0.64 | 0.81 | 1.07 | 1.10 | 1.21 | 1.54 | up | up | 60 |
| | MGC22217 | | | | | | | | | | |
| 205683_x_at | TPS1; TPS2; | 61744442 | 2.26 | 1.45 | 1.03 | 1.22 | 1.14 | 1.53 | down | down | 61 |
| | TPSB1; alpha II | | | | | | | | | | |
| 219654_at | APOBEC3F | 82659104 | 0.74 | 1.07 | 1.03 | 1.09 | 1.12 | 1.53 | up | up | 62 |
| 204017_at | ERD2L3 | 8051612 | 0.78 | 0.99 | 1.35 | 1.18 | 1.57 | 1.50 | up | up | 63 |
| 202627_s_at | SERPINE1 | 31295545 | 3.46 | 1.48 | 1.04 | 1.24 | 0.92 | 1.50 | down | down | 64 |
| 207134_x_at | TPS2; TPSB1; | 68508969 | 2.10 | 1.33 | 1.04 | 1.20 | 1.18 | 1.50 | down | down | 65 |
| | tryptaseC | | | | | | | | | | |
| 217023_x_at | TPS2; TPSB1; | 4336616 | 2.35 | 1.41 | 0.93 | 1.42 | 1.16 | 1.48 | down | down | 66 |
| | tryptaseC | | | | | | | | | | |
| 205625_s_at | CALB1 | 5863684 | 0.35 | 0.73 | 1.13 | 0.80 | 1.12 | 1.48 | up | up | 67 |
| 202075_s_at | PLTP | 33356542 | 0.72 | 0.79 | 0.98 | 1.13 | 1.35 | 1.47 | up | up | 68 |
| 216920_s_at | TARP | 540458 | 2.06 | 2.10 | 1.06 | 1.40 | 0.95 | 1.46 | down | down | 69 |
| 216474_x_at | TPS1; TPS2; | 11493901 | 2.12 | 1.30 | 1.01 | 1.26 | 1.20 | 1.43 | down | down | 70 |
| | TPSB1; alpha II | | | | | | | | | | |
| 202069_s_at | PXDN | 5446731 | 1.82 | 1.45 | 0.90 | 1.22 | 1.29 | 1.41 | down | down | 71 |
| 201666_at | EPA; EPO; HCI; | 73858576 | 2.41 | 1.68 | 1.01 | 1.32 | 1.14 | 1.41 | down | down | 72 |
| | CLGI; TIMP; | | | | | | | | | | |
| | FLJ90373 | | | | | | | | | | |
| 209771_x_at | | 2810111 | 2.29 | 1.28 | 1.14 | 1.82 | 1.24 | 1.41 | down | down | 73 |
| 215382_x_at | TPS1; TPS2; | 11493899 | 1.98 | 1.35 | 0.97 | 1.20 | 1.15 | 1.41 | down | down | 74 |
| | TPSB1; alpha II | | | | | | | | | | |
| 209288_s_at | UB1; CEP3; | 6807668 | 2.88 | 1.39 | 1.33 | 1.18 | 1.23 | 1.40 | down | down | 75 |
| | BORG2; | | | | | | | | | | |
| | FLJ46903 | | | | | | | | | | |
| 205270_s_at | SLP76; | 47078282 | 2.24 | 1.48 | 0.99 | 1.47 | 1.34 | 1.40 | down | down | 76 |
| | SLP-76 | | | | | | | | | | |
| 206519_x_at | CD33L; | 2913994 | 2.24 | 0.96 | 1.12 | 1.30 | 1.04 | 1.39 | down | down | 77 |
| | OBBP1; | | | | | | | | | | |
| | CD33L1; | | | | | | | | | | |
| | CDw327; | | | | | | | | | | |
| | SIGLEC-6 | | | | | | | | | | |
| 201952_at | ALCAM | 1728335 | 2.12 | 1.50 | 1.19 | 1.20 | 0.95 | 1.39 | down | down | 78 |
| 214240_at | GAL | 46181832 | 0.48 | 0.61 | 0.91 | 0.92 | 1.08 | 1.38 | up | up | 79 |
| 204661_at | CDW52 | 68342029 | 2.62 | 1.53 | 0.94 | 1.31 | 1.18 | 1.37 | down | down | 80 |
| 211028_s_at | TRAP1 | 33873491 | 0.66 | 0.97 | 1.16 | 0.75 | 1.12 | 1.37 | up | up | 81 |
| 207741_x_at | TPSAB1 | 61744442 | 2.00 | 1.37 | 0.96 | 1.35 | 1.16 | 1.36 | down | down | 82 |
| 210084_x_at | TPS1; TPS2; | 11493897 | 2.04 | 1.37 | 0.95 | 1.37 | 1.17 | 1.35 | down | down | 83 |
| | TPSB1; alpha II | | | | | | | | | | |
| 202917_s_at | P8; MIF; NIF; | 21614543 | 2.33 | 1.31 | 1.20 | 1.55 | 1.14 | 1.35 | down | down | 84 |
| | CAGA; CFAG; | | | | | | | | | | |
| | CGLA; L1Ag; | | | | | | | | | | |
| | MRP8; CP-10; | | | | | | | | | | |
| | MA387; | | | | | | | | | | |
| | 60B8AG | | | | | | | | | | |
| 205692_s_at | T10 | 38454325 | 2.07 | 1.50 | 1.22 | 1.28 | 0.97 | 1.34 | down | down | 85 |
| 206446_s_at | ELA1 | 58331208 | 2.32 | 1.04 | 1.45 | 1.06 | 1.09 | 1.33 | down | down | 86 |
| 200660_at | MLN70; | 5032056 | 2.08 | 1.61 | 1.02 | 1.34 | 1.18 | 1.32 | down | down | 87 |
| | S100C | | | | | | | | | | |
| 203305_at | F13A | 119395708 | 1.88 | 0.77 | 1.37 | 0.90 | 1.24 | 1.32 | down | down | 88 |
| 205626_s_at | CALB | 5579451 | 0.42 | 0.51 | 1.16 | 1.20 | 1.12 | 1.31 | up | up | 89 |
| 202388_at | G0S8 | 142365756 | 2.97 | 1.26 | 1.20 | 0.88 | 0.93 | 1.31 | down | down | 90 |
| 202411_at | P27; ISG12; | 55925613 | 0.77 | 0.81 | 1.10 | 2.26 | 1.74 | 1.31 | up | up | 91 |
| | FAM14D | | | | | | | | | | |
| 211031_s_at | CLIP; CLIP2; | 33988839 | 1.84 | 1.21 | 0.91 | 1.15 | 0.95 | 1.31 | down | down | 92 |
| | WSCR4; | | | | | | | | | | |
| | WBSCR4; | | | | | | | | | | |
| | CLIP-115; | | | | | | | | | | |
| | KIAA0291; | | | | | | | | | | |
| | MGC11333 | | | | | | | | | | |
| 217028_at | FB22; HM89; | 3059119 | 2.24 | 2.10 | 1.35 | 1.20 | 1.09 | 1.29 | down | down | 93 |
| | LAP3; LCR1; | | | | | | | | | | |
| | NPYR; WHIM; | | | | | | | | | | |
| | CD184; LESTR; | | | | | | | | | | |
| | NPY3R; | | | | | | | | | | |
| | NPYRL; | | | | | | | | | | |
| | HSY3RR; | | | | | | | | | | |
| | NPYY3R; | | | | | | | | | | |
| | D2S201E | | | | | | | | | | |
| 203382_s_at | AD2; | 48762938 | 3.73 | 1.31 | 0.81 | 1.29 | 1.29 | 1.29 | down | down | 94 |
| | MGC1571; | | | | | | | | | | |
| | apoprotein | | | | | | | | | | |
| 204415_at | 6-16; G1P3; | 94538330 | 0.93 | 1.16 | 1.11 | 2.40 | 1.75 | 1.29 | up | up | 95 |
| | FAM14C; | | | | | | | | | | |
| | IFI616; IFI-6-16 | | | | | | | | | | |
| 217975_at | DKFZp313K1940 | 55925651 | 0.61 | 0.82 | 1.23 | 0.87 | 1.20 | 1.29 | up | up | 96 |
| 207341_at | MBT; P29; | 71361687 | 4.41 | 2.33 | 1.28 | 1.94 | 1.27 | 1.29 | down | down | 97 |
| | ACPA; AGP7; | | | | | | | | | | |
| | PR-3; C-ANCA | | | | | | | | | | |
| 200999_s_at | p63; CLIMP-63; | 19920316 | 2.31 | 1.47 | 1.19 | 1.48 | 1.10 | 1.28 | down | down | 98 |
| | ERGIC-63; | | | | | | | | | | |
| | MGC99554 | | | | | | | | | | |
| 205269_at | LCP2 | 3539017 | 2.48 | 0.82 | 1.13 | 1.39 | 1.48 | 1.27 | down | down | 99 |
| 212794_s_at | KIAA1033 | 7023169 | 2.18 | 0.87 | 1.10 | 0.96 | 1.16 | 1.27 | down | down | 100 |
| 203473_at | OATPB; OATP- | 41152057 | 2.32 | 1.16 | 0.97 | 1.13 | 1.12 | 1.26 | down | down | 101 |
| | B; OATP2B1; | | | | | | | | | | |
| | SLC21A9; | | | | | | | | | | |
| | KIAA0880; | | | | | | | | | | |
| | DKFZp686E0517 | | | | | | | | | | |
| 209014_at | NRAGE; | 9963809 | 0.61 | 0.85 | 1.12 | 1.04 | 1.05 | 1.26 | up | up | 102 |
| | DLXIN-1 | | | | | | | | | | |
| 210017_at | MALT1 | 3387883 | 0.58 | 1.02 | 1.04 | 0.89 | 1.26 | 1.24 | up | up | 103 |
| 222240_s_at | ISYNA1 | 6808384 | 0.45 | 0.70 | 0.80 | 1.06 | 1.11 | 1.24 | up | up | 104 |
| 215806_x_at | TCRGC2; | 339168 | 2.30 | 1.68 | 1.11 | 1.27 | 1.05 | 1.24 | down | down | 105 |
| | TRGC2(2X); | | | | | | | | | | |
| | TRGC2(3X); T- | | | | | | | | | | |
| | cell receptor, | | | | | | | | | | |
| | gamma, | | | | | | | | | | |
| | constant region | | | | | | | | | | |
| | C2 | | | | | | | | | | |
| 208309_s_at | MLT; MLT1; | 27886564 | 0.60 | 0.80 | 0.95 | 0.93 | 1.32 | 1.23 | up | up | 106 |
| | DKFZp434L132 | | | | | | | | | | |
| 205266_at | CDF; HILDA; D- | 6006018 | 2.28 | 1.31 | 1.13 | 1.24 | 0.92 | 1.23 | down | down | 107 |
| | FACTOR | | | | | | | | | | |
| 222303_at | ETS2 | 10302862 | 2.84 | 1.45 | 1.49 | 1.45 | 0.88 | 1.22 | down | down | 108 |
| 203518_at | CHS; | 54292122 | 1.72 | 1.58 | 1.12 | 0.82 | 0.91 | 1.21 | down | down | 109 |
| | CHS1 | | | | | | | | | | |
| 202597_at | POLR2J | 11005805 | 0.57 | 0.84 | 1.12 | 1.00 | 1.16 | 1.20 | up | up | 110 |
| 204103_at | ACT2; G-26; | 90704850 | 1.85 | 1.22 | 0.97 | 1.11 | 0.82 | 1.20 | down | down | 111 |
| | LAG1; MIP1B; | | | | | | | | | | |
| | SCYA2; | | | | | | | | | | |
| | SCYA4; | | | | | | | | | | |
| | AT744.1; | | | | | | | | | | |
| | MGC104418; | | | | | | | | | | |
| | MGC126025; | | | | | | | | | | |
| | MGC126026; | | | | | | | | | | |
| | MIP-1-beta | | | | | | | | | | |
| 201005_at | 5H9; BA2; P24; | 21237762 | 2.94 | 1.26 | 1.05 | 1.38 | 1.20 | 1.20 | down | down | 112 |
| | GIG2; MIC3; | | | | | | | | | | |
| | MRP-1; BTCC- | | | | | | | | | | |
| | 1; DRAP-27; | | | | | | | | | | |
| | TSPAN29 | | | | | | | | | | |
| 221944_at | FLJ42627 | 1200802 | 1.75 | 1.16 | 0.80 | 1.27 | 1.09 | 1.20 | down | down | 113 |
| 202859_x_at | K60; NAF; | 28610153 | 5.65 | 1.94 | 2.23 | 1.12 | 1.27 | 1.20 | down | down | 114 |
| | GCP1; IL-8; | | | | | | | | | | |
| | LECT; LUCT; | | | | | | | | | | |
| | NAP1; 3-10C; | | | | | | | | | | |
| | CXCL8; GCP-1; | | | | | | | | | | |
| | LYNAP; | | | | | | | | | | |
| | MDNCF; | | | | | | | | | | |
| | MONAP; NAP- | | | | | | | | | | |
| | 1; SCYB8; | | | | | | | | | | |
| | TSG-1; AMCF-I; | | | | | | | | | | |
| | b-ENAP | | | | | | | | | | |
| 213524_s_at | RP1- | 20070269 | 0.42 | 0.60 | 1.00 | 0.88 | 1.10 | 1.19 | up | up | 115 |
| | 28O10.2 | | | | | | | | | | |
| 201688_s_at | TPD52 | 13282461 | 0.78 | 1.04 | 0.74 | 1.06 | 1.64 | 1.19 | down | up | 116 |
| 202504_at | ATDC | 109826574 | 0.38 | 0.60 | 1.00 | 0.94 | 1.11 | 1.18 | up | up | 117 |
| 209201_x_at | FB22; HM89; | 189313 | 2.17 | 1.94 | 0.91 | 1.22 | 1.17 | 1.18 | down | down | 118 |
| | LAP3; LCR1; | | | | | | | | | | |
| | NPYR; WHIM; | | | | | | | | | | |
| | CD184; LESTR; | | | | | | | | | | |
| | NPY3R; | | | | | | | | | | |
| | NPYRL; | | | | | | | | | | |
| | HSY3RR; | | | | | | | | | | |
| | NPYY3R; | | | | | | | | | | |
| | D2S201E | | | | | | | | | | |
| 209806_at | H2B/S; H2BFT; | 12654150 | 0.50 | 0.67 | 1.03 | 0.70 | 0.74 | 1.18 | up | up | 119 |
| | H2BFAiii; | | | | | | | | | | |
| | MGC131989 | | | | | | | | | | |
| 202718_at | IBP2; IGF- | 55925575 | 4.03 | 1.65 | 1.14 | 1.41 | 1.18 | 1.18 | down | down | 120 |
| | BP53 | | | | | | | | | | |
| 203505_at | TGD; ABC1; | 9755158 | 0.18 | 0.41 | 0.98 | 1.12 | 0.76 | 1.17 | up | up | 121 |
| | CERP; ABC-1; | | | | | | | | | | |
| | HDLDT1; | | | | | | | | | | |
| | FLJ14958 | | | | | | | | | | |
| 205483_s_at | G1P2; UCRP; | 142368098 | 1.12 | 1.00 | 1.29 | 3.09 | 1.84 | 1.17 | up | up | 122 |
| | IFI15 | | | | | | | | | | |
| 211796_s_at | APC | 3002924 | 1.84 | 0.91 | 1.09 | 1.43 | 1.34 | 1.16 | down | down | 123 |
| 202731_at | H731; | 34304340 | 0.55 | 0.80 | 0.88 | 0.95 | 1.02 | 1.14 | up | up | 124 |
| | MGC33046; | | | | | | | | | | |
| | MGC33047 | | | | | | | | | | |
| 211002_s_at | ATDC | 12275865 | 0.62 | 0.56 | 0.93 | 1.07 | 1.27 | 1.14 | up | up | 125 |
| 203153_at | G10P1; IFI56; | 116534936 | 0.89 | 1.00 | 1.57 | 2.26 | 1.22 | 1.13 | up | up | 126 |
| | IFI-56; IFNAI1; | | | | | | | | | | |
| | RNM561; | | | | | | | | | | |
| | GARG-16 | | | | | | | | | | |
| 218988_at | BLOV1 | 56699410 | 0.58 | 1.01 | 1.38 | 0.90 | 1.01 | 1.12 | up | up | 127 |
| 214132_at | ATP5C1 | 12727189 | 0.73 | 0.92 | 1.61 | 0.92 | 0.85 | 1.11 | up | up | 128 |
| 203504_s_at | TGD; ABC1; | 21536375 | 0.29 | 0.79 | 1.04 | 0.98 | 0.93 | 1.10 | up | up | 129 |
| | CERP; ABC-1; | | | | | | | | | | |
| | HDLDT1; | | | | | | | | | | |
| | FLJ14958 | | | | | | | | | | |
| 219426_at | AGO3; | 29294646 | 1.83 | 1.26 | 1.09 | 0.87 | 1.25 | 1.10 | down | down | 130 |
| | FLJ12765; | | | | | | | | | | |
| | MGC86946 | | | | | | | | | | |
| 206693_at | IL-7 | 28610152 | 1.66 | 0.70 | 0.91 | 1.09 | 1.25 | 1.09 | down | down | 131 |
| 210018_x_at | MLT; MLT1; | 5706377 | 0.67 | 0.74 | 0.93 | 0.92 | 1.38 | 1.09 | up | up | 132 |
| | DKFZp434L132 | | | | | | | | | | |
| 206976_s_at | HSP105A; | 42544158 | 1.98 | 1.70 | 1.01 | 0.95 | 0.98 | 1.09 | down | down | 133 |
| | HSP105B; | | | | | | | | | | |
| | KIAA0201; NY- | | | | | | | | | | |
| | CO-25; | | | | | | | | | | |
| | DKFZp686M05240 | | | | | | | | | | |
| 215936_s_at | KIAA1033 | 7023048 | 1.90 | 1.23 | 0.93 | 1.18 | 0.99 | 1.09 | down | down | 134 |
| 218566_s_at | CHP1 | 6912303 | 2.52 | 1.48 | 1.00 | 1.00 | 1.13 | 1.08 | down | down | 135 |
| 201650_at | K19; CK19, | 131412244 | 0.37 | 0.65 | 0.99 | 0.78 | 1.02 | 1.08 | up | up | 136 |
| | K1CS; | | | | | | | | | | |
| | MGC15366 | | | | | | | | | | |
| 208744_x_at | HSPH1 | 13297108 | 2.35 | 1.65 | 0.72 | 0.99 | 1.09 | 1.07 | down | down | 137 |
| 209376_x_at | POLQ | 6039911 | 1.69 | 0.99 | 0.84 | 1.10 | 1.00 | 1.07 | down | down | 138 |
| 210358_x_at | NFE1B; | 33876862 | 1.91 | 0.92 | 0.96 | 1.13 | 1.20 | 1.06 | down | down | 139 |
| | MGC2306 | | | | | | | | | | |
| 207076_s_at | ASS; | 113204625 | 2.06 | 1.29 | 1.26 | 0.90 | 1.10 | 1.05 | down | down | 140 |
| | CTLN1 | | | | | | | | | | |
| 204232_at | FCER1G | 4758343 | 2.15 | 1.14 | 1.01 | 1.32 | 1.07 | 1.04 | down | down | 141 |
| 216392_s_at | P125; | 10433116 | 1.65 | 1.54 | 0.78 | 0.96 | 1.08 | 1.04 | down | down | 142 |
| | MSTP053 | | | | | | | | | | |
| 214291_at | RPL17 | 2263330 | 1.67 | 0.81 | 1.11 | 0.96 | 0.90 | 1.03 | down | down | 143 |
| 212105_s_at | DHX9 | 11261901 | 1.37 | 0.93 | 0.44 | 0.89 | 1.00 | 1.03 | down | down | 144 |
| 205919_at | HBE1 | 28302129 | 1.45 | 0.83 | 0.75 | 1.08 | 0.70 | 1.01 | down | down | 145 |
| 206520_x_at | CD33L; | 87298825 | 1.84 | 0.86 | 1.11 | 1.10 | 1.20 | 1.01 | down | down | 146 |
| | OBBP1; | | | | | | | | | | |
| | CD33L1; | | | | | | | | | | |
| | CDw327; | | | | | | | | | | |
| | SIGLEC-6 | | | | | | | | | | |
| 209774_x_at | GRO2; GROb; | 183626 | 3.50 | 1.14 | 1.12 | 1.14 | 0.91 | 1.01 | down | down | 147 |
| | MIP2; MIP2A; | | | | | | | | | | |
| | SCYB2; MGSA- | | | | | | | | | | |
| | b; MIP-2a; | | | | | | | | | | |
| | CINC-2a; | | | | | | | | | | |
| | MGSA beta | | | | | | | | | | |
| 218332_at | BEX2; HBEX2; | 68533248 | 1.77 | 1.37 | 1.11 | 0.93 | 0.69 | 1.01 | down | down | 148 |
| | HGR74-h | | | | | | | | | | |
| 217370_x_at | | 861473 | 0.51 | 0.62 | 0.94 | 1.16 | 1.11 | 0.99 | up | up | 149 |
| 210665_at | EPI; TFI; | 4103170 | 0.56 | 1.05 | 1.08 | 1.09 | 1.17 | 0.99 | up | up | 150 |
| | LACI | | | | | | | | | | |
| 209006_s_at | NPD014; | 12005626 | 1.82 | 1.21 | 0.93 | 1.59 | 0.91 | 0.98 | down | down | 151 |
| | DJ465N24.2.1; | | | | | | | | | | |
| | RP3-465N24.4 | | | | | | | | | | |
| 206291_at | NN; NT; NT/N; | 31563516 | 2.15 | 1.25 | 1.12 | 1.31 | 1.04 | 0.98 | down | down | 152 |
| | NTS1; NMN- | | | | | | | | | | |
| | 125 | | | | | | | | | | |
| 204867_at | P35; GFRP; | 6382072 | 0.48 | 0.68 | 1.07 | 0.91 | 1.16 | 0.98 | up | up | 153 |
| | HsT16933; | | | | | | | | | | |
| | MGC138467; | | | | | | | | | | |
| | MGC138469 | | | | | | | | | | |
| 221957_at | PDK3 | 12356842 | 0.60 | 0.77 | 1.22 | 1.09 | 1.01 | 0.97 | up | up | 154 |
| 204865_at | Car3; | 6996001 | 0.19 | 0.37 | 0.78 | 0.65 | 1.17 | 0.97 | up | up | 155 |
| | CAIII | | | | | | | | | | |
| 200799_at | HSP72; | 26787973 | 5.33 | 1.93 | 0.84 | 1.09 | 1.03 | 0.97 | down | down | 156 |
| | HSPA1; | | | | | | | | | | |
| | HSPA1B; | | | | | | | | | | |
| | HSP70-1 | | | | | | | | | | |
| 211506_s_at | IL8 | 12641914 | 4.89 | 1.70 | 1.44 | 0.87 | 1.07 | 0.97 | down | down | 157 |
| 219208_at | VIT1; FBX11; | 30089925 | 0.54 | 0.95 | 1.10 | 0.93 | 0.89 | 0.96 | up | up | 158 |
| | PRMT9; | | | | | | | | | | |
| | FLJ12673; | | | | | | | | | | |
| | MGC44383; | | | | | | | | | | |
| | UG063H01 | | | | | | | | | | |
| 209189_at | c-fos | 33872858 | 4.78 | 1.00 | 0.95 | 0.95 | 1.02 | 0.96 | down | down | 159 |
| AFFX- | | 337376 | 1.12 | 0.40 | 1.09 | 1.09 | 1.62 | 0.96 | down | down | 160 |
| HUMRGE/M10098_5_at | | | | | | | | | | | |
| 213850_s_at | POLQ | 5812209 | 1.53 | 1.04 | 0.76 | 1.03 | 1.09 | 0.95 | down | down | 161 |
| 205067_at | IL-1; IL1F2; IL1- | 27894305 | 1.97 | 0.92 | 1.18 | 1.22 | 0.94 | 0.95 | down | down | 162 |
| | BETA | | | | | | | | | | |
| 212193_s_at | LARP1 | 10330305 | 1.52 | 1.01 | 0.70 | 1.11 | 1.10 | 0.95 | down | down | 163 |
| 205148_s_at | CLCN4 | 1578556 | 0.52 | 0.92 | 1.08 | 0.79 | 0.82 | 0.94 | up | up | 164 |
| 212107_s_at | DHX9 | 9804734 | 1.46 | 1.03 | 0.72 | 0.90 | 1.06 | 0.94 | down | down | 165 |
| 202793_at | C3F; OACT5; | 42542393 | 0.63 | 1.03 | 0.91 | 1.05 | 1.27 | 0.93 | up | up | 166 |
| | nessy | | | | | | | | | | |
| 205883_at | PLZF; | 66932930 | 1.95 | 0.96 | 1.17 | 1.28 | 0.99 | 0.92 | down | down | 167 |
| | ZNF145 | | | | | | | | | | |
| 214963_at | NUP160 | 10439023 | 0.50 | 0.84 | 1.11 | 0.85 | 0.96 | 0.92 | up | up | 168 |
| 212225_at | CSH1 | 45653459 | 2.01 | 1.21 | 0.93 | 1.28 | 0.92 | 0.91 | down | down | 169 |
| 207186_s_at | BPTF; FAC1; | 119395732 | 1.89 | 0.98 | 1.24 | 1.09 | 0.94 | 0.91 | down | down | 170 |
| | NURF301 | | | | | | | | | | |
| 206093_x_at | | 6005907 | 1.73 | 1.40 | 0.89 | 0.94 | 0.78 | 0.90 | down | down | 171 |
| 219494_at | FSBP | 20143928 | 1.89 | 1.02 | 0.93 | 0.87 | 0.91 | 0.90 | down | down | 172 |
| 215203_at | BSG | 6973770 | 0.61 | 0.86 | 1.34 | 0.91 | 0.96 | 0.90 | up | up | 173 |
| 204621_s_at | CSK | 5673966 | 1.89 | 0.87 | 1.14 | 1.19 | 1.04 | 0.90 | down | down | 174 |
| 200800_s_at | HSP72; | 26787973 | 4.87 | 1.60 | 0.87 | 1.09 | 1.04 | 0.89 | down | down | 175 |
| | HSPA1; | | | | | | | | | | |
| | HSPA1B; | | | | | | | | | | |
| | HSP70-1 | | | | | | | | | | |
| 219966_x_at | SMAR1; | 109698607 | 1.78 | 1.15 | 1.08 | 0.96 | 0.88 | 0.87 | down | down | 176 |
| | SMARBP1; | | | | | | | | | | |
| | FLJ10177; | | | | | | | | | | |
| | FLJ20538; | | | | | | | | | | |
| | DKFZp761H172 | | | | | | | | | | |
| 202628_s_at | PAI; PAI1; PAI- | 10835158 | 1.83 | 1.15 | 0.99 | 1.10 | 0.92 | 0.87 | down | down | 177 |
| | 1; PLANH1 | | | | | | | | | | |
| 207629_s_at | GEF; P40; | 15011973 | 1.77 | 1.04 | 0.75 | 1.31 | 1.00 | 0.86 | down | down | 178 |
| | GEFH1; LFP40; | | | | | | | | | | |
| | GEF-H1; | | | | | | | | | | |
| | KIAA0651; | | | | | | | | | | |
| | DKFZp547L106; | | | | | | | | | | |
| | DKFZp547P1516 | | | | | | | | | | |
| 201739_at | SGK1 | 25168262 | 2.37 | 1.26 | 0.93 | 0.90 | 0.76 | 0.85 | down | down | 179 |
| 205039_s_at | IK1; LYF1; hlk- | 146261998 | 1.56 | 0.96 | 0.68 | 0.84 | 0.88 | 0.85 | down | down | 180 |
| | 1; IKAROS; | | | | | | | | | | |
| | PRO0758; | | | | | | | | | | |
| | ZNFN1A1; | | | | | | | | | | |
| | Hs.54452 | | | | | | | | | | |
| 201694_s_at | TIS8; AT225; | 31317226 | 1.65 | 0.80 | 1.33 | 0.92 | 1.00 | 0.85 | down | down | 181 |
| | G0S30; NGFI- | | | | | | | | | | |
| | A; ZNF225; | | | | | | | | | | |
| | KROX-24; ZIF- | | | | | | | | | | |
| | 268 | | | | | | | | | | |
| 204318_s_at | B99 | 51317385 | 1.69 | 1.11 | 0.86 | 1.17 | 0.93 | 0.84 | down | down | 182 |
| 214805_at | CSH1 | 1710239 | 3.00 | 0.84 | 0.97 | 1.01 | 0.95 | 0.84 | down | down | 183 |
| 209007_s_at | NPD014; | 12006038 | 1.98 | 1.37 | 1.09 | 1.11 | 0.90 | 0.84 | down | down | 184 |
| | DJ465N24.2.1; | | | | | | | | | | |
| | RP3-465N24.4 | | | | | | | | | | |
| 212845_at | SMG; SMGA; | 5689442 | 0.47 | 1.18 | 1.10 | 0.82 | 1.17 | 0.84 | up | up | 185 |
| | SAMD4; | | | | | | | | | | |
| | Smaug; | | | | | | | | | | |
| | Smaug1; | | | | | | | | | | |
| | KIAA1053; | | | | | | | | | | |
| | DKFZp434H0350 | | | | | | | | | | |
| 200884_at | B-CK; | 34335231 | 0.43 | 0.66 | 1.10 | 0.82 | 0.94 | 0.84 | up | up | 186 |
| | CKBB | | | | | | | | | | |
| 222040_at | HNRPA1 | 3665816 | 2.50 | 0.97 | 1.16 | 1.36 | 0.70 | 0.83 | down | down | 187 |
| 210172_at | ZFM1; ZNF162; | 785998 | 1.54 | 1.00 | 0.85 | 1.11 | 0.73 | 0.82 | down | down | 188 |
| | D11S636 | | | | | | | | | | |
| 204881_s_at | GCS | 4507810 | 0.55 | 0.58 | 0.80 | 0.88 | 1.10 | 0.82 | up | up | 189 |
| 211998_at | H3F3B | 6142559 | 2.20 | 0.98 | 1.23 | 0.76 | 0.72 | 0.82 | down | down | 190 |
| 213998_s_at | DDX17 | 6462567 | 1.50 | 0.74 | 1.01 | 1.00 | 0.88 | 0.82 | down | down | 191 |
| 220319_s_at | MIR | 38788242 | 0.65 | 1.43 | 0.92 | 1.21 | 1.01 | 0.81 | up | up | 192 |
| 220969_s_at | | 13569855 | 0.58 | 0.87 | 1.39 | 0.93 | 0.83 | 0.81 | up | up | 193 |
| 209324_s_at | RGS16 | 11251810 | 1.76 | 1.19 | 0.92 | 1.41 | 0.83 | 0.80 | down | down | 194 |
| 209146_at | DESP4; | 10722273 | 1.86 | 1.18 | 0.99 | 0.87 | 1.00 | 0.80 | down | down | 195 |
| | ERG25; | | | | | | | | | | |
| | MGC104344 | | | | | | | | | | |
| 213213_at | | 8979786 | 1.58 | 1.13 | 1.15 | 1.19 | 0.66 | 0.79 | down | down | 196 |
| 207746_at | POLQ | 7662545 | 0.64 | 1.28 | 1.41 | 0.91 | 0.74 | 0.79 | up | up | 197 |
| 219676_at | ZNF392; | 13376833 | 0.48 | 0.80 | 1.09 | 0.91 | 1.15 | 0.79 | up | up | 198 |
| | ZSCAN16; | | | | | | | | | | |
| | FLJ22191; | | | | | | | | | | |
| | dJ265C24.3 | | | | | | | | | | |
| 203665_at | HO-1; | 4504436 | 0.36 | 1.08 | 0.96 | 1.18 | 1.13 | 0.79 | up | up | 199 |
| | bK286B10 | | | | | | | | | | |
| 216333_x_at | XB; TNX; XBS; | 183069 | 1.79 | 1.20 | 0.78 | 1.07 | 0.93 | 0.79 | down | down | 200 |
| | HXBL; TENX; | | | | | | | | | | |
| | TNXB1; | | | | | | | | | | |
| | TNXB2; TNXBS | | | | | | | | | | |
| 215269_at | KRT14 | 5658502 | 0.70 | 1.09 | 1.56 | 1.17 | 0.81 | 0.79 | up | up | 201 |
| 212777_at | GF1; HGF; | 306777 | 2.19 | 1.32 | 1.01 | 1.22 | 1.16 | 0.78 | down | down | 202 |
| | GGF1; GINGF | | | | | | | | | | |
| 210524_x_at | | 6683748 | 0.69 | 0.75 | 1.51 | 0.82 | 0.94 | 0.78 | up | up | 203 |
| 214483_s_at | HSU52521; | 4761515 | 1.36 | 0.97 | 0.63 | 0.94 | 0.97 | 0.78 | down | down | 204 |
| | MGC117369 | | | | | | | | | | |
| 203481_at | RPL28 | 4739881 | 1.56 | 0.99 | 1.00 | 0.91 | 1.40 | 0.78 | down | down | 205 |
| 204950_at | DACAR; | 7662403 | 1.90 | 0.92 | 1.21 | 0.95 | 1.00 | 0.77 | down | down | 206 |
| | NDPP1; | | | | | | | | | | |
| | TUCAN; | | | | | | | | | | |
| | CARDINAL; | | | | | | | | | | |
| | KIAA0955; | | | | | | | | | | |
| | MGC57162 | | | | | | | | | | |
| 218592_s_at | CECR5 | 51093854 | 1.77 | 1.46 | 1.07 | 1.02 | 0.81 | 0.77 | down | down | 207 |
| 218882_s_at | FLJ12796 | 5803220 | 1.55 | 1.08 | 0.92 | 1.00 | 1.06 | 0.76 | down | down | 208 |
| 221760_at | MAN1A1 | 13040709 | 1.92 | 1.72 | 1.11 | 1.14 | 0.80 | 0.76 | down | down | 209 |
| 213451_x_at | TNXB | 8361667 | 1.93 | 1.28 | 0.80 | 0.97 | 0.85 | 0.76 | down | down | 210 |
| 201041_s_at | HVH1; CL100; | 7108342 | 1.61 | 1.05 | 1.00 | 0.99 | 0.76 | 0.76 | down | down | 211 |
| | MKP-1; | | | | | | | | | | |
| | PTPN10 | | | | | | | | | | |
| 211992_at | WNK1 | 4290360 | 1.55 | 1.44 | 0.93 | 1.04 | 0.84 | 0.75 | down | down | 212 |
| 209933_s_at | IRC1; IRC2; | 4103065 | 1.50 | 1.06 | 1.36 | 1.40 | 0.84 | 0.75 | down | down | 213 |
| | IRp60; IGSF12; | | | | | | | | | | |
| | CMRF35H; | | | | | | | | | | |
| | CMRF-35H; | | | | | | | | | | |
| | CMRF35H9; | | | | | | | | | | |
| | CMRF-35-H9 | | | | | | | | | | |
| 221290_s_at | MUM1 | 7706014 | 1.52 | 1.09 | 1.03 | 1.07 | 0.86 | 0.74 | down | down | 214 |
| 214870_x_at | | 2951945 | 1.47 | 1.06 | 1.06 | 1.13 | 0.87 | 0.73 | down | down | 215 |
| 204506_at | CACNA1E | 45745444 | 1.44 | 0.99 | 1.07 | 0.94 | 0.97 | 0.72 | down | down | 216 |
| 211993_at | WNK1 | 5235021 | 1.61 | 0.97 | 1.12 | 1.04 | 0.79 | 0.71 | down | down | 217 |
| 211559_s_at | SCOTIN | 1236234 | 0.50 | 1.11 | 0.76 | 1.08 | 0.72 | 0.71 | up | up | 218 |
| 214157_at | GNAS | 2053970 | 0.49 | 0.76 | 1.11 | 0.79 | 0.70 | 0.71 | up | up | 219 |
| 204709_s_at | CHO1; KNSL5; | 20143965 | 1.46 | 1.06 | 0.89 | 1.20 | 1.03 | 0.70 | down | down | 220 |
| | MKLP1; MKLP-1 | | | | | | | | | | |
| 202581_at | HSP70-2 | 26787974 | 3.34 | 1.24 | 0.86 | 1.03 | 0.82 | 0.69 | down | down | 221 |
| 214881_s_at | UBF; | 28970 | 1.44 | 0.98 | 0.74 | 1.39 | 0.83 | 0.68 | down | down | 222 |
| | NOR-90 | | | | | | | | | | |
| 215645_at | | 6690149 | 0.65 | 1.06 | 1.23 | 1.38 | 0.76 | 0.68 | up | up | 223 |
| 208961_s_at | GBF; ZF9; | 3582142 | 1.38 | 0.99 | 1.00 | 1.30 | 1.00 | 0.67 | down | down | 224 |
| | BCD1; CPBP; | | | | | | | | | | |
| | PAC1; ST12; | | | | | | | | | | |
| | COPEB; | | | | | | | | | | |
| | DKFZp686N0199 | | | | | | | | | | |
| 217165_x_at | MT1; | 187540 | 0.44 | 0.51 | 0.97 | 0.79 | 0.91 | 0.67 | up | up | 225 |
| | MGC32732 | | | | | | | | | | |
| 204507_s_at | CNB; CNB1; | 45238847 | 2.13 | 0.98 | 0.87 | 1.13 | 0.95 | 0.66 | down | down | 226 |
| | CALNB1 | | | | | | | | | | |
| 209645_s_at | ALDH5; | 25777729 | 1.29 | 1.06 | 0.61 | 0.96 | 1.04 | 0.66 | down | down | 227 |
| | ALDHX; | | | | | | | | | | |
| | MGC2230 | | | | | | | | | | |
| 211527_x_at | VPF; VEGFA; | 340300 | 1.38 | 1.09 | 0.83 | 1.09 | 1.02 | 0.65 | down | down | 228 |
| | MGC70609 | | | | | | | | | | |
| 213629_x_at | MT1F | 11160133 | 0.55 | 0.38 | 1.17 | 0.79 | 1.13 | 0.65 | up | up | 229 |
| 34031_i_at | CAM; | 2832225 | 1.43 | 1.36 | 0.75 | 0.99 | 0.91 | 0.64 | down | down | 230 |
| | CCM1 | | | | | | | | | | |
| 206056_x_at | LSN; CD43; | 36455 | 1.29 | 0.85 | 1.11 | 1.06 | 0.76 | 0.64 | down | down | 231 |
| | GPL115 | | | | | | | | | | |
| 214657_s_at | CFB | 10995516 | 1.80 | 1.22 | 0.76 | 1.27 | 0.73 | 0.63 | down | down | 232 |
| 218507_at | HIG2; | 142381225 | 1.30 | 1.05 | 1.09 | 0.83 | 1.00 | 0.62 | down | down | 233 |
| | FLJ21076; | | | | | | | | | | |
| | MGC138388 | | | | | | | | | | |
| 209921_at | xCT; | 13516845 | 0.50 | 1.25 | 1.29 | 0.89 | 0.78 | 0.61 | up | up | 234 |
| | CCBR1 | | | | | | | | | | |
| 212272_at | LPIN1 | 2883245 | 1.31 | 1.45 | 1.04 | 1.03 | 1.21 | 0.61 | down | down | 235 |
| 213387_at | KIAA1240; | 6330790 | 1.51 | 1.02 | 1.23 | 0.83 | 0.87 | 0.60 | down | down | 236 |
| | MGC88424 | | | | | | | | | | |
| 205260_s_at | ACYPE | 45243543 | 1.20 | 0.96 | 1.03 | 0.96 | 0.84 | 0.60 | down | down | 237 |
| 214295_at | NFIA | 6117000 | 0.47 | 0.81 | 1.80 | 0.89 | 0.78 | 0.59 | up | up | 238 |
| 214007_s_at | | 7457569 | 1.38 | 1.01 | 0.55 | 0.72 | 0.77 | 0.58 | down | down | 239 |
| 205632_s_at | MSS4; | 115529452 | 1.29 | 1.36 | 0.96 | 0.94 | 0.84 | 0.58 | down | down | 240 |
| | STM7 | | | | | | | | | | |
| 208960_s_at | KLF6 | 10035976 | 1.33 | 1.01 | 0.83 | 1.15 | 1.01 | 0.58 | down | down | 241 |
| 210513_s_at | VPF; VEGFA; | 5901560 | 1.39 | 0.99 | 0.79 | 0.90 | 0.98 | 0.58 | down | down | 242 |
| | MGC70609 | | | | | | | | | | |
| 212501_at | | 46231593 | 1.22 | 1.04 | 1.07 | 0.94 | 0.74 | 0.57 | down | down | 243 |
| 219498_s_at | EVI9; CTIP1; | 20336306 | 1.74 | 1.17 | 0.98 | 0.76 | 0.65 | 0.57 | down | down | 244 |
| | BCL11A-L; | | | | | | | | | | |
| | BCL11A-S; | | | | | | | | | | |
| | FLJ10173; | | | | | | | | | | |
| | FLJ34997; | | | | | | | | | | |
| | KIAA1809; | | | | | | | | | | |
| | BCL11A-XL | | | | | | | | | | |
| 39248_at | HBA2 | 1231892 | 1.61 | 1.37 | 0.98 | 0.93 | 0.67 | 0.57 | down | down | 245 |
| 201531_at | TTP; G0S24; | 141802261 | 1.70 | 1.08 | 1.02 | 1.21 | 0.95 | 0.57 | down | down | 246 |
| | G0S24; TIS11; | | | | | | | | | | |
| | NUP475; | | | | | | | | | | |
| | RNF162A | | | | | | | | | | |
| 202934_at | HK2 | 5177228 | 1.29 | 1.16 | 0.99 | 1.03 | 0.86 | 0.56 | down | down | 247 |
| 204243_at | Zn-15L; | 142368487 | 1.16 | 1.24 | 0.89 | 1.00 | 1.00 | 0.56 | down | down | 248 |
| | ZNF292L; | | | | | | | | | | |
| | MGC142226 | | | | | | | | | | |
| 221245_s_at | | 13540591 | 0.56 | 0.70 | 1.13 | 0.79 | 0.74 | 0.56 | up | down | 249 |
| 35776_at | ITSN; SH3D1A; | 3859852 | 1.20 | 1.04 | 1.10 | 0.87 | 0.74 | 0.55 | down | down | 250 |
| | SH3P17; | | | | | | | | | | |
| | MGC134948; | | | | | | | | | | |
| | MGC134949 | | | | | | | | | | |
| 216336_x_at | | 6729581 | 0.35 | 0.45 | 1.21 | 0.82 | 0.89 | 0.54 | up | up | 251 |
| 201473_at | JUNB | 44921611 | 1.24 | 0.84 | 1.01 | 0.96 | 0.72 | 0.54 | down | down | 252 |
| 213434_at | STX2 | 1102896 | 1.31 | 0.99 | 0.84 | 0.86 | 0.82 | 0.53 | down | down | 253 |
| 203249_at | KIAA0388 | 2224716 | 1.16 | 0.82 | 0.77 | 1.10 | 0.70 | 0.53 | down | down | 254 |
| 203126_at | CDK6 | 7657235 | 1.63 | 0.86 | 0.79 | 1.08 | 0.65 | 0.52 | down | down | 255 |
| 205967_at | H4/g; H4FG; | 21071024 | 1.16 | 0.92 | 0.96 | 0.94 | 0.74 | 0.52 | down | down | 256 |
| | dJ221C16.1 | | | | | | | | | | |
| 210347_s_at | EVI9; CTIP1; | 12150277 | 1.29 | 0.97 | 0.92 | 0.86 | 0.82 | 0.51 | down | down | 257 |
| | BCL11A-L; | | | | | | | | | | |
| | BCL11A-S; | | | | | | | | | | |
| | FLJ10173; | | | | | | | | | | |
| | FLJ34997; | | | | | | | | | | |
| | KIAA1809; | | | | | | | | | | |
| | BCL11A-XL | | | | | | | | | | |
| 218136_s_at | | 28466986 | 1.06 | 0.99 | 0.86 | 1.07 | 0.70 | 0.50 | down | down | 258 |
| 211560_s_at | | 11493529 | 1.11 | 1.03 | 0.85 | 0.95 | 0.78 | 0.50 | down | down | 259 |
| 209112_at | KIP1; CDKN4; | 12805034 | 1.00 | 0.95 | 0.98 | 0.92 | 0.72 | 0.50 | down | down | 260 |
| | P27KIP1 | | | | | | | | | | |
| 212907_at | SLC30A1 | 5769332 | 0.49 | 1.01 | 1.02 | 0.82 | 0.63 | 0.50 | up | up | 261 |
| 201732_s_at | CLC3; | 2599547 | 1.11 | 0.98 | 0.83 | 0.89 | 0.88 | 0.49 | down | down | 262 |
| | CIC-3 | | | | | | | | | | |
| 219878_s_at | BTEB3; FKLF2; | 37693994 | 1.13 | 0.74 | 0.89 | 0.87 | 0.79 | 0.49 | down | down | 263 |
| | NSLP1; | | | | | | | | | | |
| | RFLAT1; | | | | | | | | | | |
| | RFLAT-1 | | | | | | | | | | |
| 218274_s_at | ZNF744; | 109150424 | 1.02 | 1.03 | 1.02 | 1.06 | 0.77 | 0.49 | up | down | 264 |
| | FLJ10415 | | | | | | | | | | |
| 203911_at | RAP1GA1; | 4506414 | 1.11 | 1.01 | 1.01 | 0.99 | 0.89 | 0.47 | down | down | 265 |
| | KIAA0474; | | | | | | | | | | |
| | rap1GAPII | | | | | | | | | | |
| 203946_s_at | ARG2 | 1763757 | 1.08 | 1.32 | 0.99 | 1.10 | 0.84 | 0.47 | down | down | 266 |
| 212185_x_at | MT2 | 31543214 | 0.39 | 0.51 | 1.10 | 0.77 | 1.00 | 0.47 | up | down | 267 |
| 205842_s_at | JAK2 | 3236321 | 1.32 | 1.25 | 0.76 | 0.87 | 0.74 | 0.46 | down | down | 268 |
| 203845_at | PCAF | 55949646 | 1.00 | 1.11 | 0.91 | 0.80 | 0.64 | 0.46 | down | down | 269 |
| 211456_x_at | LOC645745 | 13310411 | 0.41 | 0.51 | 1.10 | 0.79 | 1.04 | 0.46 | up | up | 270 |
| 219630_at | DD96; SPAP; | 41152089 | 1.00 | 0.98 | 0.96 | 1.06 | 1.01 | 0.46 | down | down | 271 |
| | MAP17; RP1- | | | | | | | | | | |
| | 18D14.5 | | | | | | | | | | |
| 205896_at | OCTN1; | 24497489 | 1.13 | 1.19 | 1.12 | 1.07 | 0.66 | 0.45 | down | down | 272 |
| | MGC34546; | | | | | | | | | | |
| | MGC40524 | | | | | | | | | | |
| 207459_x_at | SS; GPB; MNS; | 75905814 | 0.92 | 0.99 | 0.88 | 0.83 | 0.62 | 0.45 | down | down | 273 |
| | GYPA; | | | | | | | | | | |
| | CD235b; | | | | | | | | | | |
| | GPB.NY; | | | | | | | | | | |
| | GYPHe.NY | | | | | | | | | | |
| 221778_at | KIAA1718 | 8905200 | 1.14 | 0.99 | 0.90 | 1.00 | 0.68 | 0.45 | down | down | 274 |
| 204326_x_at | | 28976166 | 0.35 | 0.49 | 1.20 | 0.83 | 1.08 | 0.44 | up | up | 275 |
| 208581_x_at | MT1; MT- | 31543213 | 0.35 | 0.49 | 1.08 | 0.77 | 0.92 | 0.44 | up | up | 276 |
| | 1I | | | | | | | | | | |
| 201170_s_at | DEC1; | 4503298 | 1.48 | 0.71 | 0.97 | 0.78 | 0.62 | 0.43 | down | down | 277 |
| | STRA13; | | | | | | | | | | |
| | Stra14; | | | | | | | | | | |
| | SHARP-2 | | | | | | | | | | |
| 212859_x_at | MT1E | 11111447 | 0.26 | 0.35 | 1.32 | 0.77 | 0.81 | 0.43 | up | up | 278 |
| 219497_s_at | EVI9; CTIP1; | 20336304 | 1.67 | 1.22 | 0.96 | 0.69 | 0.70 | 0.43 | down | down | 279 |
| | BCL11A-L; | | | | | | | | | | |
| | BCL11A-S; | | | | | | | | | | |
| | FLJ10173; | | | | | | | | | | |
| | FLJ34997; | | | | | | | | | | |
| | KIAA1809; | | | | | | | | | | |
| | BCL11A-XL | | | | | | | | | | |
| 206461_x_at | MT1; | 124244058 | 0.27 | 0.43 | 1.11 | 0.72 | 0.90 | 0.43 | up | up | 280 |
| | MGC70702 | | | | | | | | | | |
| 202124_s_at | ATXN1 | 10722559 | 1.01 | 1.00 | 0.97 | 0.93 | 0.70 | 0.43 | down | down | 281 |
| 206686_at | PTPRF | 37595546 | 0.50 | 0.70 | 0.87 | 0.85 | 1.03 | 0.42 | up | down | 282 |
| 214407_x_at | GYPA | 3835942 | 0.87 | 1.02 | 0.83 | 0.87 | 0.67 | 0.42 | down | down | 283 |
| 219410_at | DERP7; | 8922242 | 0.35 | 0.61 | 0.79 | 1.02 | 1.05 | 0.42 | up | up | 284 |
| | FLJ10134 | | | | | | | | | | |
| 203414_at | MMA; | 52630444 | 0.85 | 0.76 | 1.23 | 0.73 | 0.65 | 0.41 | up | down | 285 |
| | PAQR11 | | | | | | | | | | |
| 207220_at | DO; DOK1 | 61835133 | 0.90 | 1.07 | 0.96 | 0.81 | 0.68 | 0.40 | up | down | 286 |
| | CD297 | | | | | | | | | | |
| 216063_at | beta globin | 1198084 | 0.43 | 0.57 | 0.93 | 0.73 | 0.70 | 0.40 | up | down | 287 |
| | pseudogene | | | | | | | | | | |
| 207854_at | GPE; | 38373678 | 0.81 | 1.11 | 0.82 | 0.69 | 0.72 | 0.40 | up | down | 288 |
| | MNS; | | | | | | | | | | |
| | MiIX | | | | | | | | | | |
| 218489_s_at | PBGS; ALADH; | 51558761 | 1.01 | 0.83 | 0.73 | 1.06 | 0.64 | 0.40 | down | down | 289 |
| | MGC5057 | | | | | | | | | | |
| 211821_x_at | MN; GPA; | 392430 | 0.90 | 0.88 | 0.80 | 0.83 | 0.73 | 0.39 | down | down | 290 |
| | MNS; GPSAT; | | | | | | | | | | |
| | CD235a; | | | | | | | | | | |
| | GPErik; | | | | | | | | | | |
| | HGpMiV; | | | | | | | | | | |
| | HGpMiX; | | | | | | | | | | |
| | GpMilII; | | | | | | | | | | |
| | HGpMiXI; | | | | | | | | | | |
| | HGpMiIII; | | | | | | | | | | |
| | HGpSta(C) | | | | | | | | | | |
| 217678_at | SLC7A11 | 2216118 | 0.35 | 1.36 | 1.17 | 0.87 | 0.71 | 0.39 | up | up | 291 |
| 209566_at | MGC26273 | 5262661 | 0.99 | 1.06 | 0.98 | 0.90 | 0.78 | 0.39 | down | down | 292 |
| 202364_at | MXI; MAD2; | 57242781 | 0.79 | 1.06 | 0.89 | 0.85 | 0.71 | 0.39 | up | down | 293 |
| | MXD2; | | | | | | | | | | |
| | MGC43220 | | | | | | | | | | |
| 204467_s_at | PD1; NACP; | 6806896 | 1.11 | 1.03 | 0.99 | 0.91 | 0.69 | 0.38 | down | down | 294 |
| | PARK1; | | | | | | | | | | |
| | PARK4; | | | | | | | | | | |
| | MGC110988 | | | | | | | | | | |
| 204745_x_at | MT1; MT1K; | 10835229 | 0.25 | 0.36 | 1.15 | 0.69 | 0.89 | 0.36 | up | up | 295 |
| | MGC12386 | | | | | | | | | | |
| 208335_s_at | FY; Dfy; GPD; | 42822886 | 0.76 | 0.90 | 0.84 | 0.81 | 0.62 | 0.36 | up | down | 296 |
| | CCBP1; CD234 | | | | | | | | | | |
| 221748_s_at | FGFR1 | 5435035 | 1.19 | 1.05 | 1.07 | 0.97 | 0.55 | 0.35 | down | down | 297 |
| 218145_at | NIPK; SINK; | 41327717 | 0.99 | 0.92 | 1.09 | 0.96 | 0.49 | 0.34 | up | down | 298 |
| | TRB3; SKIP3; | | | | | | | | | | |
| | C20orf97 | | | | | | | | | | |
| 221920_s_at | SLC25A37 | 10038376 | 1.13 | 1.01 | 0.96 | 1.05 | 0.63 | 0.33 | down | down | 299 |
| 212543_at | ST4 | 2072424 | 0.34 | 0.63 | 0.81 | 0.66 | 0.77 | 0.33 | up | down | 300 |
| 201849_at | NIP3 | 7669480 | 0.23 | 0.60 | 1.11 | 0.81 | 0.78 | 0.32 | up | up | 301 |
| 201848_s_at | NIP3 | 558845 | 0.27 | 0.56 | 0.95 | 0.85 | 0.86 | 0.32 | up | up | 302 |
| 202887_s_at | Dig2; REDD1; | 56676369 | 0.66 | 0.61 | 1.06 | 0.88 | 0.47 | 0.30 | up | down | 303 |
| | REDD-1; | | | | | | | | | | |
| | RTP801; | | | | | | | | | | |
| | FLJ20500; | | | | | | | | | | |
| | RP11-442H21.1 | | | | | | | | | | |
| 215449_at | SLC25A30 | 3308215 | 0.81 | 0.77 | 1.05 | 0.76 | 0.67 | 0.29 | up | down | 304 |
| 208886_at | H10; H1FV; | 12652786 | 0.88 | 0.84 | 0.97 | 0.86 | 0.49 | 0.28 | up | down | 305 |
| | MGC5241 | | | | | | | | | | |
| 205592_at | K60; NAF; | 535096 | 1.00 | 1.05 | 0.96 | 0.85 | 0.53 | 0.28 | down | down | 306 |
| | GCP1; IL-8; | | | | | | | | | | |
| | LECT; LUCT; | | | | | | | | | | |
| | NAP1; 3-10C; | | | | | | | | | | |
| | CXCL8; GCP-1; | | | | | | | | | | |
| | LYNAP; | | | | | | | | | | |
| | MDNCF; | | | | | | | | | | |
| | MONAP; NAP- | | | | | | | | | | |
| | 1; SCYB8; | | | | | | | | | | |
| | TSG-1; AMCF-I; | | | | | | | | | | |
| | b-ENAP | | | | | | | | | | |

[0231] We have identified the top genes that are differentially regulated in B19 infected CD36+ cells at 6 hours post infection and 48 hours post infection as an example to demonstrate the early and late gene expressions. Genes differentially expressed in viral infected cells can be utilized in diagnostic kits and for detection of B19 infected cells. The gene expression profile of one or more genes differentially regulated can be used to identify virus infected cells. Such genes can be selected from those provided in Table 16 or Table 17.

TABLE 16
The table below shows the top gene genes differentially expressed
at timepoints 6 hours and 48 hours post-infection.

| Description | 6 hr PI |
|---|---|
| interleukin 8 | 2.225 |
| elastase 2, neutrophil | 1.831 |
| Nuclear factor I/A | 1.804 |
| myeloperoxidase | 1.792 |
| AV711904 DCA Homo sapiens cDNA clone DCAAIE08 5′, | 1.756 |
| mRNA sequence. | |
| Cytochrome P450, family 1, subfamily B, polypeptide 1 | 1.66 |
| ATP synthase, H+ transporting, mitochondrial F1 | 1.61 |
| complex, gamma polypeptide 1 | |
| interferon-induced protein 44 | 1.598 |
| immediate early response 3 | 1.583 |
| interferon-induced protein with tetratricopeptide | 1.569 |
| repeats 1 | |
| Description | 48 hr PI |
| AV711904 DCA Homo sapiens cDNA clone DCAAIE08 5′, | 5.34 |
| mRNA sequence. | |
| Charcot-Leyden crystal protein | 4.35 |
| tachykinin 3 (neuromedin K, neurokinin beta) | 3.917 |
| cytochrome P450, family 1, subfamily B, polypeptide 1 | 3.833 |
| elastase 2, neutrophil | 3.638 |
| myeloperoxidase | 3.21 |
| myeloperoxidase | 3.124 |
| Cytochrome P450, family 1, subfamily B, polypeptide 1 | 3.121 |
| carboxypeptidase A3 (mast cell) | 2.952 |
| actin, alpha 2, smooth muscle, aorta | 2.944 |

TABLE 17

| | Gene | GI | 0 | 6 |
|---|---|---|---|---|
| 202859_x_at | | NM_000584 | 5.65 | 2.225 |
| 206871_at | | NM_001972 | 8.71 | 1.831 |
| 214295_at | NFIA | AW129056 | 0.47 | 1.804 |
| 203949_at | IL6 | NM_000250 | 6.12 | 1.792 |
| 213975_s_at | | AV711904 | 12.77 | 1.756 |
| 202436_s_at | CYP1B1 | AU144855 | 1.23 | 1.66 |
| 214132_at | ATP5C1 | BG232034 | 0.73 | 1.61 |
| 214453_s_at | p44; | NM_006417 | 0.96 | 1.598 |
| | MTAP44 | | | |
| 201631_s_at | | NM_003897 | 2.23 | 1.583 |
| 203153_at | | NM_001548 | 0.89 | 1.569 |

| Probe set | Gene | GI | 0 | 48 |
|---|---|---|---|---|
| 213975_s_at | | AV711904 | 12.77 | 5.34 |
| 206207_at | | NM_001828 | 2.84 | 4.35 |
| 219992_at | | NM_013251 | 1.04 | 3.92 |
| 202437_s_at | CP1B; | NM_000104 | 0.78 | 3.83 |
| | GLC3A | | | |
| 206871_at | | NM_001972 | 8.71 | 3.64 |
| 203949_at | IL6 | NM_000250 | 6.12 | 3.21 |
| 203948_s_at | IL6 | J02694 | 6.74 | 3.12 |

[0232] One or more of these genes are useful to identify parvovirus B19 infected cells even at early stages of infection.

[0233] It should be noted that, as used in this specification and the appended claims, the singular forms “a”, “an” and “the” include plural referents unless the content clearly dictates otherwise. It should also be noted that the term “or” is generally employed in its sense including “and/or” unless the content clearly dictates otherwise.

[0234] All publications and patent applications in this specification are indicative of the level of ordinary skill in the art to which this disclosure pertains. All publications and patent applications are herein incorporated by reference to the same extent as if each individual publication or patent application was specifically and individually indicated by reference.

[0235] The disclosure has been described with reference to various specific and preferred embodiments and techniques. However, it should be understood that many variations and modifications may be made while remaining within the spirit and scope of the disclosure.

1. A method for producing parvovirus B19, comprising:
introducing a parvovirus B19 genome into a CD36⁺ erythroid progenitor cell and culturing the cell under conditions to provide for replication of parvovirus B19 genome.

2. The method of claim 1, wherein introducing parvovirus B19 into a CD36⁺ erythroid progenitor cell comprises contacting the cells with parvovirus B19 isolated from serum.

3. The method of claim 1, wherein introducing parvovirus B19 into a CD36⁺ erythroid progenitor cell comprises introducing a vector comprising an infectious clone of parvovirus B19 into the cells.

4. The method of claim 3, wherein the infectious clone comprises a nucleic acid sequence having at least 90% nucleic acid identity to SEQ ID NO:1 or SEQ ID NO:2.

5. The method of claim 1, further comprising producing CD36⁺ erythroid progenitor cell comprising culturing hematopoietic stem cells in expansion media comprising stem cell factor (SCF), interleukin 3 (IL-3), and erythropoietin under conditions that allow for expansion and differentiation of the cells to a population of cells having at least 25% CD36⁺ cells.

6. The method of claim 5, wherein the expansion media comprises 10⁻⁶ M IL-3, 100 ng/ml recombinant human SCF, and 3 IU/ml recombinant human erythropoietin.

7. The method of claim 5, wherein the expansion media further comprises hydrocortisone.

8. The method of claim 5, wherein the hematopoietic stem cells are cultured in the expansion media for about 4 days under conditions that allow for expansion and differentiation of the cells, diluted in expansion media, and the diluted cells are cultured for about an additional 4 days under conditions that allow for expansion and differentiation of the cells.

9. The method of claim 1, wherein the CD36⁺ erythroid progenitor cells are CD36⁺, CD44⁺, CD235a⁺, CD34⁻, CD19⁻, CD10⁻, CD4⁻, CD3⁻, and CD2⁻.

10. The method of claim 5, wherein the hematopoietic stem cells have CD34, CD133, or both on the cell surface.

11. The method of claim 1, wherein the CD36⁺ erythroid progenitor cells are non-enucleated.

12. The method of claim 1, wherein the CD36⁺ erythroid progenitor cells comprise at least one of the following characteristics selected from the group consisting of: non-enucleated, CD44⁺, CD34⁻, CD19⁻, CD10⁻, CD4⁻, CD3⁻, CD2⁻, hemoglobin, globoside, and combinations thereof.

13. The method of claim 5, wherein the population of CD36⁺ erythroid progenitor cells comprise at least 25% to 100% CD36+ cells.

14. The method of claim 5, wherein the population of CD36⁺ erythroid progenitor cells comprise at least 25% CD36+ cells and 25% globoside positive cells.

15. The method of claim 1, further comprising detecting reproduction of the parvovirus B19 viral genome, transcripts, or viral protein.

16. The method of claim 15, wherein detecting reproduction of the parvovirus B19 viral genome comprises detecting B19 DNA, spliced capsid transcripts, unspliced capsid or NS protein transcripts, or B19 capsid protein in the infected cells.

17. The method of claim 15, wherein the B19 capsid protein is detected by binding to a specific antibody for B19 capsid protein.

18. The method of claim 15, wherein the B19 transcripts are detected using RT-PCR or by qRT-PCR.

19. The method of claim 15, wherein detecting reproduction of the parvovirus B19 viral genome comprises detecting B19 viral DNA in the cell.

20. The method of claim 1, wherein replication of the parvovirus B19 viral genome in the CD36⁺ erythroid progenitor cells is greater than replication of the viral genome in UT7/Epo-S1 cells.

21. The method of claim 20, wherein replication of the parvovirus B19 viral genome in the CD36⁺ erythroid progenitor cells is at least 10 fold greater compared to UT7/Epo-S1 cells.

22. The method of claim 20, wherein replication of the parvovirus B19 viral genome in the CD36⁺ erythroid progenitor cells is at least 100 fold greater compared to UT7/Epo-S1 cells.

23. The method of claim 20, wherein replication of the parvovirus B19 viral genome in the CD36⁺ erythroid progenitor cells is at least 500 fold greater compared to UT7/Epo-S1 cells.

24. The method of claim 1, wherein the replicated parvovirus B19 is infectious.

25. The method of claim 1, further comprising detecting reproduction of the parvovirus B19 comprising contacting permissive cells with supernatant from the infected CD36⁺ erythroid progenitor cells and analyzing the contacted permissive cells for B19 spliced capsid transcripts or other B19 transcripts or B19 capsid protein, wherein detection of B19 transcripts or other B19 transcripts or B19 capsid protein indicates the parvovirus B19 is infectious.

26. The method of claim 25, wherein the erythroid progenitor cells are CD36⁺, CD44⁺, CD235a⁺, CD34⁻, CD19⁻, CD10⁻, CD4⁻, CD3⁻, and CD2⁻.

27. A cell population comprising erythroid progenitor cells, wherein at least 25% to 100% of the erythroid progenitor cells are CD36+ and globoside+cells, and less than 70% of the cell population are CD33⁺.

28. CD36+ erythroid progenitor cells produced by a method comprising:
culturing hematopoietic stem cells in expansion media comprising stem cell factor (SCF), interleukin 3 (IL-3), and erythropoietin under conditions that allow for expansion and differentiation of the cells to a population of cells having at least 25% CD36⁺ cells.

29. The erythroid progenitor cells of claim 28, wherein the expansion media comprises 10⁻⁶ M IL-3, 100 ng/ml recombinant human SCF, and 3 IU/ml recombinant human erythropoietin.

30. The erythroid progenitor cells of claim 28, wherein the expansion media further comprises hydrocortisone.

31. The erythroid progenitor cells of any of claims claim 1, wherein the hematopoietic stem cells are cultured in the expansion media for about 4 days under conditions that allow for expansion and differentiation of the cells, diluted in expansion media, and the diluted cells are cultured for about an additional 4 days under conditions that allow for expansion and differentiation of the cells.

32. The cell population or erythroid progenitor cells of claim 27, wherein the CD36⁺ erythroid progenitor cells are CD36⁺, CD44⁺, CD235a⁺, CD34⁻, CD19⁻, CD10⁻, CD4⁻, CD3⁻, and CD2⁻.

33. The erythroid progenitor cells of claim 28, wherein the hematopoietic stem cells have CD34, CD133, or both on the cell surface.

34. Immortalized erythroid progenitor cells produced by a method comprising:
(a) culturing hematopoietic stem cells in expansion media under conditions that allow for expansion and differentiation of the cells to a population of at least 25% CD36⁺ cells; and
(b) immortalizing the CD36⁺ erythroid progenitor cells with a virus or viral vector.

35. The immortalized erythroid progenitor cells of claim 34, wherein (b) comprises transfecting the CD36⁺ erythroid progenitor cells with a viral vector comprising SV40 large T-antigen.

36. The immortalized erythroid progenitor cells of claim 34, wherein the viral vector comprises adenovirus or lentivirus.

37. The immortalized erythroid progenitor cells of claim 34, wherein the method further comprises culturing the hematopoietic stem cells in expansion media for about 4 days under conditions that allow for expansion and differentiation of the cells, diluting the cells in expansion media, and culturing the diluted cells for about 4 day under conditions that allow for expansion and differentiation of the cells.

38. The immortalized erythroid progenitor cells of claim 34, wherein the immortalized erythroid progenitor cells are CD36⁺, CD44⁺, CD235a⁺, CD34⁻, CD19⁻, CD10⁻, CD4⁻, CD3⁻, and CD2⁻.

39. The immortalized erythroid progenitor cells of claim 34, wherein the cells are non-enucleated.

40. The immortalized erythroid progenitor cells of claim 34, wherein the cells comprise hemoglobin and/or globoside.

41. An immortalized erythroid progenitor cell of claim 34, wherein the cell is CD36⁺, CD44⁺, CD235a⁺, CD34⁻, CD19⁻, CD10⁻, CD4⁻, CD3⁻, and CD2⁻.

42. The immortalized erythroid progenitor cell of claim 34 that can divide at least 2 to 50 times.

43. A method of detecting a parvovirus B19 infection comprising contacting the CD36⁺ erythroid progenitor cell of claim 28 with a sample; culturing the cells under conditions suitable for viral replication; and detecting the presence of the virus in the cell.

44. The method of claim 43, wherein the CD36⁺ erythroid progenitor cell are cultured in expansion media comprising stem cell factor (SCF), interleukin 3 (IL-3), and erythropoietin under conditions that allow for expansion and differentiation of the cells to a population of cells having at least 25% CD36⁺ cells.

45. The method of claim 44, wherein the expansion media comprises 10⁻⁶ M IL-3, 100 ng/ml recombinant human SCF, and 3 IU/ml recombinant human erythropoietin.

46. The method of claim 44, wherein the expansion media further comprises hydrocortisone.

47. The method of claim 43, wherein the CD36⁺ erythroid progenitor cells are CD36⁺, CD44⁺, CD235a⁺, CD34⁻, CD19⁻, CD10⁻, CD4⁻, CD3⁻, and CD2⁻.

48. The method of claim 43, wherein the CD36⁺ erythroid progenitor cells are non-enucleated.

49. The method of claim 43, wherein the CD36⁺ erythroid progenitor cells comprise at least one of the following characteristics selected from the group consisting of: non-enucleated, CD44⁺, CD34⁻, CD19⁻, CD10⁻, CD4⁻, CD3⁻, CD2⁻, hemoglobin, globoside, and combinations thereof.

50. The method of claim 43, wherein the population of CD36⁺ erythroid progenitor cells comprise at least 25% to 100% CD36+ cells.

51. The method of claim 43, wherein the population of CD36⁺ erythroid progenitor cells comprise at least 25% CD36+ cells and 25% globoside positive cells.

52. The method of claim 43, further comprising detecting reproduction of the parvovirus B19 viral genome, transcripts, or viral protein.

53. The method of claim 52, wherein detecting reproduction of the parvovirus B19 viral genome comprises detecting B19 DNA, spliced capsid transcripts, unspliced capsid or NS protein transcripts, or B19 capsid protein in the infected cells.

54. The method of claim 52, wherein the B19 capsid protein is detected by binding to a specific antibody for B19 capsid protein.

55. The method of claim 52 wherein the B19 transcripts are detected using RT-PCR or by qRT-PCR.

56. The method of claim 52, wherein detecting reproduction of the parvovirus B19 viral genome comprises detecting B19 viral DNA in the cell.

57. A method of detecting a parvovirus B19 infection comprising contacting the CD36⁺ erythroid progenitor cell of claim with a sample; culturing the cells under conditions suitable for viral replication; and detecting the gene expression profile of at least one of the genes of Table 15 and at least one parvovirus B19 viral genome, transcript, or viral protein.

58. The method of claim 58, wherein expression of at least one or all of the genes of Table 16 are detected.

59. The method of claim 57, wherein expression of the genes is detected at 6 hours post infection.

60. The method of claim 57, wherein expression of the genes is detected at 48 hours post infection.

61. The method of claim 57, wherein the gene expression is detected by an oligonucleotide that specifically binds to the polynucleotide encoding the gene.

62. A kit for detecting antibodies to parvovirus B19, comprising a composition of a CD36+ erythroid progenitor cell of claim 27, and a composition of a parvovirus B19 virus sample.

63. The kit of claim 62, wherein the composition comprises at least 10³ genomes/ml of parvovirus B19.

64. A kit for detecting or diagnosing parvovirus B19 infection, comprising a composition comprising a CD36+ erythroid progenitor cell of claim 43, and at least one oligonucleotide that specifically binds to parvovirus B19 genome or at least one viral transcript and/or an antibody that specifically binds to a viral protein.

65. A kit for detecting or diagnosing parvovirus B19 infection comprising a) a composition comprising: a CD36+ erythroid progenitor cell of claim 27; b) at least one oligonucleotide that specifically binds to parvovirus B19 genome or at least one viral transcript and/or an antibody that specifically binds to a viral protein; and c) at least one oligonucleotide that specifically binds to at least one of the genes of Table 15.

66. A microarray that comprises agents that bind 400 different genes or less including at least one or all of the genes of Table 15.

67. The microarray of claim 66, that comprises agents that bind at least one or all of the genes of Table 16.

68. The microarray of claim 66 or claim 67, that comprises agents that bind at least one or all of the genes of Table 16 and at least one or all of the parvovirus B19 transcripts.

The application's sequence listing, which the Patent Office published only in electronic form, follows.

SEQUENCE LISTING (322 sequences)

SEQ ID NO: 1 - DNA, 673 bp, Homo sapiens
ttatggccggggatgccttcatctgtttagtcatctccaaaaacagtaaaaataaccactttttgttgggcaatatgaaatttttaaaggagtagaataccatatgatagaaacagactgcctgaattgagaattttgattttttaaagtgtgttttctttctaaattgctgttccttaatttgattaatttaattcatgtattatgattaaatctgaggcagatgagcttacaagtattgaaataattactaattaatcacaaatgtgaagttatgcatgatgtaaaaaatacaaacattctaattaaaggctttgcaacacagaaaaaaaaaaaaaaaaaaaaaaaaaaaaaacatgtcggccgcctcggcccagtcgactctagactcgagcaagcttatgcatgcggcccgaattcgagctcacttggccaattcgccctatagtgagtcgtattacaattcactgcccgtcgttttacaacggcgggactgggaaaaccctggcgttacccaacttaatcgccttgaagaaatccccctttgccagctggcgtaatagcgaagaggcccgcaccgatcgcccttccaacagttgggcaacctgaatgccgaatggaaattggaagccgtaataattttgttaaaaatcggcgttaaaattttggtaaa

SEQ ID NO: 2 - DNA, 641 bp, Homo sapiens
  LGALS10; MGC149659; LPPL_HUMAN
atttaaattctgcagctcagagattcacacagaagtctggacacaattcagaagagccacccagaaggagacaacaatgtccctgctacccgtgccatacacagaggctgcctctttgtctactggttctactgtgacaatcaaagggcgaccacttgcctgtttcttgaatgaaccatatctgcaggtggatttccacactgagatgaaggaggaatcagacattgtcttccatttccaagtgtgctttggtcgtcgtgtggtcatgaacagccgtgagtatggggcctggaagcagcaggtggaatccaagaatatgccctttcaggatggccaagaatttgaactgagcatctcagtgctgccagataagtaccaggtaatggtcaatggccaatcctcttacacctttgaccatagaatcaagcctgaggctgtgaagatggtgcaagtgtggagagatatctccctgaccaaatttaatgtcagctatttaaagagataaccagacttcatgttgccaaggaatccctgtctctacgtgaacttgggattccaaagccagctaacagcatgatcttttctcacttcaatccttactcctgctcattaaaacttaatcaaacttcaaaaaaaaaaaa

SEQ ID NO: 3 - DNA, 832 bp, Homo sapiens
  NKB; NKNB; PRO1155; ZNEUROK1
ctgagtgactgcagccttcctagatcccctccactcggtttctctctttgcaggagcaccggcagcaccagtgtgtgaggggagcaggcagcggtcctagccagttccttgatcctgccagaccacccagcccccggcacagagctgctccacaggcaccatgaggatcatgctgctattcacagccatcctggccttcagcctagctcagagctttggggctgtctgtaaggagccacaggaggaggtggttcctggcgggggccgcagcaagagggatccagatctctaccagctgctccagagactcttcaaaagccactcatctctggagggattgctcaaagccctgagccaggctagcacagatcctaaggaatcaacatctcccgagaaacgtgacatgcatgacttctttgtgggacttatgggcaagaggagcgtccagccagactctcctacggatgtgaatcaagagaacgtccccagctttggcatcctcaagtatcccccgagagcagaataggtactccacttccggactcctggactgcattaggaagacctctttccctgtcccaatccccaggtgcgcacgctcctgttaccctttctcttccctgttcttgtaacattcttgtgctttgactccttctccatcttttctacctgaccctggtgtggaaactgcatagtgaatatccccaaccccaatgggcattgactgtagaataccctagagttcctgtagtgtcctacattaaaaatataatgtctctctctattcctcaacaataaaggatttttgcatatgaaaaaaaaaaaaaaaaaa

SEQ ID NO: 4 - DNA, 5128 bp, Homo sapiens
  NKB; NKNB; PRO1155; ZNEUROK1
actctggagtgggagtgggagcgagcgcttctgcgactccagttgtgagagccgcaagggcatgggaattgacgccactcaccgacccccagtctcaatctcaacgctgtgaggaaacctcgactttgccaggtccccaagggcagcggggctcggcgagcgaggcacccttctccgtccccatcccaatccaagcgctcctggcactgacgacgccaagagactcgagtgggagttaaagcttccagtgagggcagcaggtgtccaggccgggcctgcgggttcctgttgacgtcttgccctaggcaaaggtcccagttccttctcggagccggctgtcccgcgccactggaaaccgcacctccccgcagcatgggcaccagcctcagcccgaacgacccttggccgctaaacccgctgtccatccagcagaccacgctcctgctactcctgtcggtgctggccactgtgcatgtgggccagcggctgctgaggcaacggaggcggcagctccggtccgcgcccccgggcccgtttgcgtggccactgatcggaaacgcggcggcggtgggccaggcggctcacctctcgttcgctcgcctggcgcggcgctacggcgacgttttccagatccgcctgggcagctgccccatagtggtgctgaatggcgagcgcgccatccaccaggccctggtgcagcagggctcggccttcgccgaccggccggccttcgcctccttccgtgtggtgtccggcggccgcagcatggctttcggccactactcggagcactggaaggtgcagcggcgcgcagcccacagcatgatgcgcaacttcttcacgcgccagccgcgcagccgccaagtcctcgagggccacgtgctgagcgaggcgcgcgagctggtggcgctgctggtgcgcggcagcgcggacggcgccttcctcgacccgaggccgctgaccgtcgtggccgtggccaacgtcatgagtgccgtgtgtttcggctgccgctacagccacgacgaccccgagttccgtgagctgctcagccacaacgaagagttcgggcgcacggtgggcgcgggcagcctggtggacgtgatgccctggctgcagtacttccccaacccggtgcgcaccgttttccgcgaattcgagcagctcaaccgcaacttcagcaacttcatcctggacaagttcttgaggcactgcgaaagccttcggcccggggccgccccccgcgacatgatggacgcctttatcctctctgcggaaaagaaggcggccggggactcgcacggtggtggcgcgcggctggatttggagaacgtaccggccactatcactgacatcttcggcgccagccaggacaccctgtccaccgcgctgcagtggctgctcctcctcttcaccaggtatcctgatgtgcagactcgagtgcaggcagaattggatcaggtcgtggggagggaccgtctgccttgtatgggtgaccagcccaacctgccctatgtcctggccttcctttatgaagccatgcgcttctccagctttgtgcctgtcactattcctcatgccaccactgccaacacctctgtcttgggctaccacattcccaaggacactgtggtttttgtcaaccagtggtctgtgaatcatgacccagtgaagtggcctaacccggagaactttgatccagctcgattcttggacaaggatggcctcatcaacaaggacctgaccagcagagtgatgattttttcagtgggcaaaaggcggtgcattggcgaagaactttctaagatgcagctttttctcttcatctccatcctggctcaccagtgcgatttcagggccaacccaaatgagcctgcgaaaatgaatttcagttatggtctaaccattaaacccaagtcatttaaagtcaatgtcactctcagagagtccatggagctccttgatagtgctgtccaaaatttacaagccaaggaaacttgccaataagaagcaagaggcaagctgaaattttagaaatattcacatcttcggagatgaggagtaaaattcagtttttttccagttcctcttttgtgctgcttctcaattagcgtttaaggtgagcataaatcaactgtccatcaggtgaggtgtgctccatacccagcggttcttcatgagtagtgggctatgcaggagcttctgggagatttttttgagtcaaagacttaaagggcccaatgaattattatatacatactgcatcttggttatttctgaaggtagcattctttggagttaaaatgcacatatagacacatacacccaaacacttacaccaaactactgaatgaagaagtattttggtaaccaggccatttttggtgggaatccaagattggtctcccatatgcagaaatagacaaaaagtatattaaacaaagtttcagagtatattgttgaagagacagagacaagtaatttcagtgtaaagtgtgtgattgaaggtgataagggaaaagataaagaccagaaattcccttttcaccttttcaggaaaataacttagactctagtatttatgggtggatttatccttttgccttctggtatacttccttacttttaaggataaatcataaagtcagttgctcaaaaagaaatcaatagttgaattagtgagtatagtggggttccatgagttatcatgaattttaaagtatgcattattaaattgtaaaactccaaggtgatgttgtacctcttttgcttgccaaagtacagaatttgaattatcagcaaagaaaaaaaaaaaagccagccaagctttaaattatgtgaccataatgtactgatttcagtaagtctcataggttaaaaaaaaaagtcaccaaatagtgtgaaatatattacttaactgtccgtaagcagtatattagtattatcttgttcaggaaaaggttgaataatatatgccttgtgtaatattgaaaattgaaaagtacaactaacgcaaccaagtgtgctaaaaatgagcttgattaaatcaaccacctatttttgacatggaaatgaagcagggtttcttttcttcactcaaattttggcgaatctcaaaattagatcctaagatgtgttcttatttttataacatctttattgaaattctatttataatacagaatcttgttttgaaaataacctaattaatatattaaaattccaaattcatggcatgcttaaattttaactaaattttaaagccattctgattattgagttccagttgaagttagtggaaatctgaacattctcctgtggaaggcagagaaatctaagctgtgtctgcccaatgaataatggaaaatgccatgaattacctggatgttctttttacgaggtgacaagagttggggacagaactcccattacaactgaccaagtttctcttctagatgattttttgaaagttaacattaatgcctgctttttggaaagtcagaatcagaagatagtcttggaagctgtttggaaaagacagtggagatgaggtcagttgtgttttttaagatggcaattactttggtagctgggaaagcataaagctcaaatgaaatgtatgcattcacatttagaaaagtgaattgaagtttcaagttttaaagttcattgcaattaaacttccaaagaaagttctacagtgtcctaagtgctaagtgcttattacattttattaagctttttggaatctttgtaccaaaattttaaaaaagggagtttttgatagttgtgtgtatgtgtgtgtggggtggggggatggtaagagaaaagagagaaacactgaaaagaaggaaagatggttaaacattttcccactcattctgaattaattaatttggagcacaaaattcaaagcatggacatttagaagaaagatgtttggcgtagcagagttaaatctcaaataggctattaaaaaagtctacaacatagcagatctgttttgtggtttggaatattaaaaaacttcatgtaattttattttaaaatttcatagctgtacttcttgaatataaaaaatcatgccagtatttttaaaggcattagagtcaactacacaaagcaggcttgcccagtacatttaaattttttggcacttgccattccaaaatattatgccccaccaaggctgagacagtgaatttgggctgctgtagcctatttttttagattgagaaatgtgtagctgcaaaaataatcatgaaccaatctggatgcctcattatgtcaaccaggtccagatgtgctataatctgtttttacgtatgtaggcccagtcgtcatcagatgcttgcggcaaaagaaagctgtgtttatatggaagaaagtaaggtgcttggagtttacctggcttatttaatatgcttataacctagttaaagaaaggaaaagaaaacaaaaaacgaatgaaaataactgaatttggaggctggagtaatcagattactgctttaatcagaaaccctcattgtgtttctaccggagagagaatgtatttgctgacaaccattaaagtcagaagttttactccaggttattgcaataaagtataatgtttattaaatgcttcatttgtatgtcaaagctttgactctataagcaaattgcttttttccaaaacaaaaagatgtctcaggtttgttttgtgaattttctaaaagctttcatgtcccagaacttagcctttacctgtgaagtgttactacagccttaatattttcctagtagatctatattagatcaaatagttgcatagcagtatatgttaatttgtgtgtttttagctgtgacacaactgtgtgattaaaaggtatactttagtagacatttataactcaaggataccttcttatttaatcttttcttatttttgtactttatcatgaatgcttttagtgtgtgcataatagctacagtgcatagttgtagacaaagtacattctggggaaacaacatttatatgtagcctttactgtttgatataccaaattaaaaaaaaattgtatctcattacttatactgggacaccattaccaaaataataaaaatcactttcataatcttgaaaaaa

SEQ ID NO: 5 - DNA, 938 bp, Homo sapiens
  NE; HLE; HNE; PMN-E
gcacggaggggcagagaccccggagccccagccccaccatgaccctcggccgccgactcgcgtgtcttttcctcgcctgtgtcctgccggccttgctgctggggggcaccgcgctggcctcggagattgtggggggccggcgagcgcggccccacgcgtggcccttcatggtgtccctgcagctgcgcggaggccacttctgcggcgccaccctgattgcgcccaacttcgtcatgtcggccgcgcactgcgtggcgaatgtaaacgtccgcgcggtgcgggtggtcctgggagcccataacctctcgcggcgggagcccacccggcaggtgttcgccgtgcagcgcatcttcgaaaacggctacgaccccgtaaacttgctcaacgacatcgtgattctccagctcaacgggtcggccaccatcaacgccaacgtgcaggtggcccagctgccggctcagggacgccgcctgggcaacggggtgcagtgcctggccatgggctggggccttctgggcaggaaccgtgggatcgccagcgtcctgcaggagctcaacgtgacggtggtgacgtccctctgccgtcgcagcaacgtctgcactctcgtgaggggccggcaggccggcgtctgtttcggggactccggcagccccttggtctgcaacgggctaatccacggaattgcctccttcgtccggggaggctgcgcctcagggctctaccccgatgcctttgccccggtggcacagtttgtaaactggatcgactctatcatccaacgctccgaggacaacccctgtccccacccccgggacccggacccggccagcaggacccactgagaagggctgcccgggtcacctcagctgcccacacccacactctccagcatctggcacaataaacattctctgttttgtagaaaaaaaaaaaaaaaa

SEQ ID NO: 6 - DNA, 3215 bp, Homo sapiens
  IL6
gacaatatcaggtgagctgtggaggtggggtccttggaagctggatgacagcagctggcaaggggataagagagcagtgagcccctccctcaaggaggtctggctttatccatagacagggccctctgaggtggggctgaggtacaaagggggattgagcagcccaggagaagagagatgggggttcccttcttctcttctctcagatgcatggtggacttaggaccttgctgggctgggggtctcactgcagagatgaagctgcttctggccctagcagggctcctggccattctggccacgccccagccctctgaaggtgctgctccagctgtcctgggggaggtggacacctcgttggtgctgagctccatggaggaggccaagcagctggtggacaaggcctacaaggagcggcgggaaagcatcaagcagcggcttcgcagcggctcagccagccccatggaactcctatcctacttcaagcagccggtggcagccaccaggacggcggtgagggccgctgactacctgcacgtggctctagacctgctggagaggaagctgcggtccctgtggcgaaggccattcaatgtcactgatgtgctgacgcccgcccagctgaatgtgttgtccaagtcaagcggctgcgcctaccaggacgtgggggtgacttgcccggagcaggacaaataccgcaccatcaccgggatgtgcaacaacagacgcagccccacgctgggggcctccaaccgtgcctttgtgcgctggctgccggcggagtatgaggacggcttctctcttccctacggctggacgcccggggtcaagcgcaacggcttcccggtggctctggctcgcgcggtctccaacgagatcgtgcgcttccccactgatcagctgactccggaccaggagcgctcactcatgttcatgcaatggggccagctgttggaccacgacctcgacttcacccctgagccggccgcccgggcctccttcgtcactggcgtcaactgcgagaccagctgcgttcagcagccgccctgcttcccgctcaagatcccgcccaatgacccccgcatcaagaaccaagccgactgcatcccgttcttccgctcctgcccggcttgccccgggagcaacatcaccatccgcaaccagatcaacgcgctcacttccttcgtggacgccagcatggtgtacggcagcgaggagcccctggccaggaacctgcgcaacatgtccaaccagctggggctgctggccgtcaaccagcgcttccaagacaacggccgggccctgctgccctttgacaacctgcacgatgacccctgtctcctcaccaaccgctcagcgcgcatcccctgcttcctggcaggggacacccgttccagtgagatgcccgagctcacctccatgcacaccctcttacttcgggagcacaaccggctggccacagagctcaagagcctgaaccctaggtgggatggggagaggctctaccaggaagcccggaagatcgtgggggccatggtccagatcatcacttaccgggactacctgcccctggtgctggggccaacggccatgaggaagtacctgcccacgtaccgttcctacaatgactcagtggacccacgcatcgccaacgtcttcaccaatgccttccgctacggccacaccctcatccaacccttcatgttccgcctggacaatcggtaccagcccatggaacccaacccccgtgtccccctcagcagggtcttttttgcctcctggagggtcgtgctggaaggtggcattgaccccatcctccggggcctcatggccacccctgccaagctgaatcgtcagaaccaaattgcagtggatgagatccgggagcgattgtttgagcaggtcatgaggattgggctggacctgcctgctctgaacatgcagcgcagcagggaccacggcctcccaggatacaatgcctggaggcgcttctgtgggctcccgcagcctgaaactgtgggccagctgggcacggtgctgaggaacctgaaattggcgaggaaactgatggagcagtatggcacgcccaacaacatcgacatctggatgggcggcgtgtccgagcctctgaagcgcaaaggccgcgtgggcccactcctcgcctgcatcatcggtacccagttcaggaagctccgggatggtgatcggttttggtgggagaacgagggtgtgttcagcatgcagcagcgacaggccctggcccagatctcattgccccggatcatctgcgacaacacaggcatcaccaccgtgtctaagaacaacatcttcatgtccaactcatatccccgggactttgtcaactgcagtacacttcctgcattgaacctggcttcctggagggaagcctcctagaggccaggtaagggggtgcagcagtgaggggtatatctgggctggccagttggaaccacggagatctccttgccctagatgagcccagccctgttctgggtgcagctgagaaaatgagtgactagacgttcatttgtgtgctcatgtatgtgcgaagtatataaattggcttttcatgcgtgtgtgttgtctgaacatggggagtgtttcatgggttatgtgtatgtgccatttatgtgagtgtgtgtttgtgctgatgagaatactgagtatgtggaaggcagcagagcggactggtgaggagcacagctcaggaactagactgcctgggttccaatcctggctctgtggcttgctagctatgtgaccttgagcaaattaccctccttaaacaagagttttcttccttgtaaattacatctgtcatggtttcttggagggcccacttgtatcctctggttcttcatttattgagcacctactacatgcaaggcactgtactaggcgtgagaagcatatagaggcaagaaagagataccaagatgccatctgtgtcctggttagcagagctggaccagtggtgccttggagggataagccagctgcagctgggctgtgtggttgacttatgggcccagccagccaggctcaggccatggctcccctttttcttcctcaccctgatttcttgcttattcactgaagttctcctgaagaggaactgggcctgttgccctttctgtaccatttatttgctcccaatgtttatgataataaaggcaccgctgatggggacctcc

SEQ ID NO: 7 - DNA, 2568 bp, Homo sapiens
  IL6
gtccttggaagctggatgacagcagctggcaaggggataagagagcagtgagcccctccctcaaggaggtctggctttatccatagacagggccctctgaggtggggctgaggtacaaagggggattgagcagcccaggagaagagagatgggggttcccttcttctcttctctcagatgcatggtggacttaggaccttgctgggctgggggtctcactgcagagatgaagctgcttctggccctagcagggctcctggccattctggccacgccccagccctctgaaggtgctgctccagctgtcctgggggaggtggacacctcgttggtgctgagctccatggaggaggccaagcagctggtggacaaggcctacaaggagcggcgggaaagcatcaagcagcggcttcgcagcggctcagccagccccatggaactcctatcctacttcaagcagccggtggcagccaccaggacggcggtgagggccgctgactacctgcacgtggctctagacctgctggagaggaagctgcggtccctgtggcgaaggccattcaatgtcactgatgtgctgacgcccgcccagctgaatgtgttgtccaagtcaagcggctgcgcctaccaggacgtgggggtgacttgcccggagcaggacaaataccgcaccatcaccgggatgtgcaacaacagacgcagccccacgctgggggcctccaaccgtgcctttgtgcgctggctgccggcggagtatgaggacggcttctctcttccctacggctggacgcccggggtcaagcgcaacggcttcccggtggctctggctcgcgcggtctccaacgagatcgtgcgcttccccactgatcagctgactccggaccaggagcgctcactcatgttcatgcaatggggccagctgttggaccacgacctcgacttcacccctgagccggccgcccgggcctccttcgtcactggcgtcaactgcgagaccagctgcgttcagcagccgccctgcttcccgctcaagatcccgcccaatgacccccgcatcaagaaccaagccgactgcatcccgttcttccgctcctgcccggcttgccccgggagcaacatcaccatccgcaaccagatcaacgcgctcacttccttcgtggacgccagcatggtgtacggcagcgaggagcccctggccaggaacctgcgcaacatgtccaaccagctggggctgctggccgtcaaccagcgcttccaagacaacggccgggccctgctgccctttgacaacctgcacgatgacccctgtctcctcaccaaccgctcagcgcgcatcccctgcttcctggcaggggacacccgttccagtgagatgcccgagctcacctccatgcacaccctcttacttcgggagcacaaccggctggccacagagctcaagagcctgaaccctaggtgggatggggagaggctctaccaggaagcccggaagatcgtgggggccatggtccagatcatcacttaccgggactacctgcccctggtgctggggccaacggccatgaggaagtacctgcccacgtaccgttcctacaatgactcagtggacccacgcatcgccaacgtcttcaccaatgccttccgctacggccacaccctcatccaacccttcatgttccgcctggacaatcggtaccagcccatggaacccaacccccgtgtccccctcagcagggtcttttttgcctcctggagggtcgtgctggaaggtggcattgaccccatcctccggggcctcatggccacccctgccaagctgaatcgtcagaaccaaattgcagtggatgagatccgggagcgattgtttgagcaggtcatgaggattgggctggacctgcctgctctgaacatgcagcgcagcagggaccacggcctcccaggatacaatgcctggaggcgcttctgtgggctcccgcagcctgaaactgtgggccagctgggcacggtgctgaggaacctgaaattggcgaggaaactgatggagcagtatggcacgcccaacaacatcgacatctggatgggcggcgtgtccgagcctctgaagcgcaaaggccgcgtgggcccactcctcgcctgcatcatcggtacccagttcaggaagctccgggatggtgatcggttttggtgggagaacgagggtgtgttcagcatgcagcagcgacaggccctggcccagatctcattgccccggatcatctgcgacaacacaggcatcaccaccgtgtctaagaacaacatcttcatgtccaactcatatccccgggactttgtcaactgcagtacacttcctgcattgaacctggcttcctggagggaagcctcctagaggccaggtaagggggtgcagcagtgaggggtatatctgggctggccagttggaaccacggagatctccttgccctagatgagcccagccctgttctgggtgcagctgagaaaatgagtgactagacgttcatttgtgtgctcatgtatgtgcgaagtatataaattggcttttcatgcgtg

SEQ ID NO: 8 - DNA, 570 bp, Homo sapiens
  CYP1B1
  modified_base (499)..(499): a, c, t or g
ctttctttaactaggttataagcatattaaataagccaggtaaactccaagcaccttactttcttccatataaacacagctttccttttgccgcaagcatctgatgacgactgggcctacatacgtaaaaacagattatagcacatctggacctggttgacataatgaggcatccagattggttcatgattatttttgcagctacacatttctcaatctaaaaaaataggctacagcagcccaaattcactgtctcagccttggtggggcataatattttggaatggcaagtgccaaaaaatttaaatgtactgggcaagcctgctttgtgtagttgactctaatgcctttaaaaatactggcatgattttttatattcaagaagtacagctatgaaattttaaaataaaattacatgaagttttttaatattccaaaccacaaaacagatctgctatgtggtagactttttaatagcctattggagatttaactctgntacgccaacatcttctttaaagtcatgctttgaatttgggctccaaataattaattagaagggggggaaat

SEQ ID NO: 9 - DNA, 1633 bp, Homo sapiens
  CDH13
aaagaagaaccatgaggctcatcctgcctgtgggtttgattgctaccactcttgcaattgctcctgtccgctttgacagggagaaggtgttccgcgtgaagccccaggatgaaaaacaagcagacatcataaaggacttggccaaaaccaatgagcttgacttctggtatccaggtgccacccaccacgtagctgctaatatgatggtggatttccgagttagtgagaaggaatcccaagccatccagtctgccttggatcaaaataaaatgcactatgaaatcttgattcatgatctacaagaagagattgagaaacagtttgatgttaaagaagatatcccaggcaggcacagctacgcaaaatacaataattgggaaaagattgtggcttggactgaaaagatgatggataagtatcctgaaatggtctctcgtattaaaattggatctactgttgaagataatccactatatgttctgaagattggggaaaagaatgaaagaagaaaggctatttttatggattgtggcattcacgcacgagaatgggtctccccagcattctgccagtggtttgtctatcaggcaaccaaaacttatgggagaaacaaaattatgaccaaactcttggaccgaatgaatttttacattcttcctgtgttcaatgttgatggatatatttggtcatggacaaagaaccgcatgtggagaaaaaatcgttccaagaaccaaaactccaaatgcatcggcactgacctcaacaggaattttaatgcttcatggaactccattcctaacaccaatgacccatgtgcagataactatcggggctctgcaccagagtccgagaaagagacgaaagctgtcactaatttcattagaagccacctgaatgaaatcaaggtttacatcaccttccattcctactcccagatgctattgtttccctatggatatacatcaaaactgccacctaaccatgaggacttggccaaagttgcaaagattggcactgatgttctatcaactcgatatgaaacccgctacatctatggcccaatagaatcaacaatttacccgatatcaggttcttctttagactgggcttatgacctgggcatcaaacacacatttgcctttgagctccgagataaaggcaaatttggttttctccttccagaatcccggataaagccaacgtgcagagagaccatgctagctgtcaaatttattgccaagtatatcctcaagcatacttcctaaagaactgccctctgtttggaataagccaattaatccttttttgtgcctttcatcagaaagtcaatcttcagttatccccaaatgcagcttctatttcacctgaatccttctcttgctcatttaagtcccatgttactgctgtttgcttttacttactttcagtagcaccataacgaagtagctttaagtgaaaccttttaactacctttctttgctccaagtgaagtttggacccagcagaaagcattattttgaaaggtgatatacagtggggcacagaaaacaaatgaaaaccctcagtttctcacagattttcaccatgtggcttcatcaatttatgtgctaatacaataaaataaaatgcactt

SEQ ID NO: 10 - DNA, 1330 bp, Homo sapiens
  ACTSA
gcagcccagccaagcactgtcaggaatcctgtgaagcagctccagctatgtgtgaagaagaggacagcactgccttggtgtgtgacaatggctctgggctctgtaaggccggctttgctggggacgatgctcccagggctgttttcccatccattgtgggacgtcccagacatcagggggtgatggtgggaatgggacaaaaagacagctacgtgggtgacgaagcacagagcaaaagaggaatcctgaccctgaagtacccgatagaacatggcatcatcaccaactgggacgacatggaaaagatctggcaccactctttctacaatgagcttcgtgttgcccctgaagagcatcccaccctgctcacggaggcacccctgaaccccaaggccaaccgggagaaaatgactcaaattatgtttgagactttcaatgtcccagccatgtatgtggctatccaggcggtgctgtctctctatgcctctggacgcacaactggcatcgtgctggactctggagatggtgtcacccacaatgtccccatctatgagggctatgccttgccccatgccatcatgcgtctggatctggctggccgagatctcactgactacctcatgaagatcctgactgagcgtggctattccttcgttactactgctgagcgtgagattgtccgggacatcaaggagaaactgtgttatgtagctctggactttgaaaatgagatggccactgccgcatcctcatcctcccttgagaagagttacgagttgcctgatgggcaagtgatcaccatcggaaatgaacgtttccgctgcccagagaccctgttccagccatccttcatcgggatggagtctgctggcatccatgaaaccacctacaacagcatcatgaagtgtgatattgacatcaggaaggacctctatgctaacaatgtcctatcagggggcaccactatgtaccctggcattgccgaccgaatgcagaaggagatcacggccctagcacccagcaccatgaagatcaagatcattgcccctccggagcgcaaatactctgtctggatcggtggctccatcctggcctctctgtccaccttccagcagatgtggatcagcaaacaggaatacgatgaagccgggccttccattgtccaccgcaaatgcttctaaaacactttcctgctcctctctgtctctagcacacaactgtgaatgtcctgtggaattatgccttcagttcttttccaaatcattcctagccaaagctctgactcgttacctatgtgttttttaataaatctgaaataggctactggtaa

SEQ ID NO: 11 - DNA, 7889 bp, Homo sapiens
  LAMB2; MGC87297
gtgcaggctgctcccggggtaggtgagggaagcgcggaggcggcgcgcgggggcagtggtcggcgagcagcgcggtcctcgctaggggcgcccacccgtcagtctctccggcgcgagccgccgccaccgcccgcgccggagtcaggcccctgggcccccaggctcaagcagcgaagcggcctccgggggacgccgctaggcgagaggaacgcgccggtgcccttgccttcgccgtgacccagcgtgcgggcggcgggatgagagggagccatcgggccgcgccggccctgcggccccgggggcggctctggcccgtgctggccgtgctggcggcggccgccgcggcgggctgtgcccaggcagccatggacgagtgcacggacgagggcgggcggccgcagcgctgcatgcccgagttcgtcaacgccgccttcaacgtgactgtggtggccaccaacacgtgtgggactccgcccgaggaatactgtgtgcagaccggggtgaccggggtcaccaagtcctgtcacctgtgcgacgccgggcagccccacctgcagcacggggcagccttcctgaccgactacaacaaccaggccgacaccacctggtggcaaagccagaccatgctggccggggtgcagtaccccagctccatcaacctcacgctgcacctgggaaaagcttttgacatcacctatgtgcgtctcaagttccacaccagccgcccggagagctttgccatttacaagcgcacacgggaagacgggccctggattccttaccagtactacagtggttcctgtgagaacacctactccaaggcaaaccgcggcttcatcaggacaggaggggacgagcagcaggccttgtgtactgatgaattcagtgacatttctcccctcactgggggcaacgtggccttttctaccctggaaggaaggcccagcgcctataactttgacaatagccctgtgctgcaggaatgggtaactgccactgacatcagagtaactcttaatcgcctgaacacttttggagatgaagtgtttaacgatcccaaagttctcaagtcctattattatgccatctctgattttgctgtaggtggcagatgtaaatgtaatggacacgcaagcgagtgtatgaagaacgaatttgataagctggtgtgtaattgcaaacataacacatatggagtagactgtgaaaagtgtcttcctttcttcaatgaccggccgtggaggagggcaactgcggaaagtgccagtgaatgcctgccctgtgattgcaatggtcgatcccaggaatgctacttcgaccctgaactctatcgttccactggccatgggggccactgtaccaactgccaggataacacagatggcgcccactgtgagaggtgccgagagaacttcttccgccttggcaacaatgaagcctgctcttcatgccactgtagtcctgtgggctctctaagcacacagtgtgatagttacggcagatgcagctgtaagccaggagtgatgggggacaaatgtgaccgttgccagcctggattccattctctcactgaagcaggatgcaggccatgctcttgtgatccctctggcagcatagatgaatgtaatattgaaacaggaagatgtgtttgcaaagacaatgtcgaaggcttcaattgtgaaagatgcaaacctggattttttaatctggaatcatctaatcctcggggttgcacaccctgcttctgctttgggcattcttctgtctgtacaaacgctgttggctacagtgtttattctatctcctctacctttcagattgatgaggatgggtggcgtgcggaacagagagatggctctgaagcatctctcgagtggtcctctgagaggcaagatatcgccgtgatctcagacagctactttcctcggtacttcattgctcctgcaaagttcttgggcaagcaggtgttgagttatggtcagaacctctccttctcctttcgagtggacaggcgagatactcgcctctctgcagaagaccttgtgcttgagggagctggcttaagagtatctgtacccttgatcgctcagggcaattcctatccaagtgagaccactgtgaagtatgtcttcaggctccatgaagcaacagattacccttggaggcctgctcttaccccttttgaatttcagaagctcctaaacaacttgacctctatcaagatacgtgggacatacagtgagagaagtgctggatatttggatgatgtcaccctggcaagtgctcgtcctgggcctggagtccctgcaacttgggtggagtcctgcacctgtcctgtgggatatggagggcagttttgtgagatgtgcctctcaggttacagaagagaaactcctaatcttggaccatacagtccatgtgtgctttgcgcctgcaatggacacagcgagacctgtgatcctgagacaggtgtttgtaactgcagagacaatacggctggcccgcactgtgagaagtgcagtgatgggtactatggagattcaactgcaggcacctcctccgattgccaaccctgtccgtgtcctggaggttcaagttgtgctgttgttcccaagacaaaggaggtggtgtgcaccaactgtcctactggcaccactggtaagagatgtgagctctgtgatgatggctactttggagaccccctgggtagaaacggccctgtgagactttgccgcctgtgccagtgcagtgacaacatcgatcccaatgcagttggaaattgcaatcgcttgacgggagaatgcctgaagtgcatctataacactgctggcttctattgtgaccggtgcaaagacggattttttggaaatcccctggctcccaatccagcagacaaatgcaaagcctgcaattgcaatctgtatgggaccatgaagcagcagagcagctgtaaccccgtgacggggcagtgtgaatgtttgcctcacgtgactggccaggactgtggtgcttgtgaccctggattctacaatctgcagagtgggcaaggctgtgagaggtgtgactgccatgccttgggctccaccaatgggcagtgtgacatccgcaccggccagtgtgagtgccagcccggcatcactggtcagcactgtgagcgctgtgaggtcaaccactttgggtttggacctgaaggctgcaaaccctgtgactgtcatcctgagggatctctttcacttcagtgcaaagatgatggtcgctgtgaatgcagagaaggctttgtgggaaatcgctgtgaccagtgtgaagaaaactatttctacaatcggtcttggcctggctgccaggaatgtccagcttgttaccggctggtaaaggataaggttgctgatcatagagtgaagctccaggaattagagagtctcatagcaaaccttggaactggggatgagatggtgacagatcaagccttcgaggatagactaaaggaagcagagagggaagttatggacctccttcgtgaggcccaggatgtcaaagatgttgaccagaatttgatggatcgcctacagagagtgaataacactctgtccagccaaattagccgtttacagaatatccggaataccattgaagagactggaaacttggctgaacaagcgcgtgcccatgtagagaacacagagcggttgattgaaatcgcatccagagaacttgagaaagcaaaagtcgctgctgccaatgtgtcagtcactcagccagaatctacaggggacccaaacaacatgactcttttggcagaagaggctcgaaagcttgctgaacgtcataaacaggaagctgatgacattgttcgagtggcaaagacagccaatgatacgtcaactgaggcatacaacctgcttctgaggacactggcaggagaaaatcaaacagcatttgagattgaagagcttaataggaagtatgaacaagcgaagaacatctcacaggatctggaaaaacaagctgcccgagtacatgaggaggccaaaagggccggtgacaaagctgtggagatctatgccagcgtggctcagctgagccctttggactctgagacactggagaatgaagcaaataacataaagatggaagctgagaatctggaacaactgattgaccagaaattaaaagattatgaggacctcagagaagatatgagagggaaggaacttgaagtcaagaaccttctggagaaaggcaagactgaacagcagaccgcagaccaactcctagcccgagctgatgctgccaaggccctcgctgaagaagctgcaaagaagggacgggataccttacaagaagctaatgacattctcaacaacctgaaagattttgataggcgtgtgaacgataacaagacggccgcagaggaggcactaaggaagattcctgccatcaaccagaccatcactgaagccaatgaaaagaccagagaagcccagcaggccctgggcagtgctgcggcggatgccacagaggccaagaacaaggcccatgaggcggagaggatcgcgagcgctgtccaaaagaatgccaccagcaccaaggcagaagctgaaagaacttttgcagaagttacagatctggataatgaggtgaacaatatgttgaagcaactgcaggaagcagaaaaagagctaaagagaaaacaagatgacgctgaccaggacatgatgatggcagggatggcttcacaggctgctcaagaagccgagatcaatgccagaaaagccaaaaactctgttactagcctcctcagcattattaatgacctcttggagcagctggggcagctggatacagtggacctgaataagctaaacgagattgaaggcaccctaaacaaagccaaagatgaaatgaaggtcagcgatcttgataggaaagtgtctgacctggagaatgaagccaagaagcaggaggctgccatcatggactataaccgagatatcgaggagatcatgaaggacattcgcaatctggaggacatcaggaagaccttaccatctggctgcttcaacaccccgtccattgaaaagccctagtgtctttagggctggaaggcagcatccctctgacaggggggcagttgtgaggccacagagtgccttgacacaaagattacatttttcagacccccactcctctgctgctgtccatgactgtccttttgaaccaggaaaagtcacagagtttaaagagaagcaaattaaacatcctgaatcgggaacaaagggttttatctaataaagtgtctcttccattcacgttgctaccttacccacactttcccttctgatttgcgtgaggacgtggcatcctacgttactgtacagtggcataagcacatcgtgtgagcccatgtatgctggggtagagcaagtagccctcccctgtctcatcgataccagcagaacctcctcagtctcagtactcttgtttctatgaaggaaaagtttggctactaacagtagcattgtgatggccagtatatccagtccatggataaagaaaatgcatctgcatctcctacccctcttccttctaagcaaaaggaaataaacatcctgtgccaaaggtattggtcatttagaatgtcggtagccatccatcagtgcttttagttattatgagtgtaggacactgagccatccgtgggtcaggatgcaattatttataaaagtctccaggtgaacatggctgaagatttttctagtatattaataattgactaggaagatgaactttttttcagatctttgggcagctgataatttaaatctggatgggcagcttgcactcaccaatagaccaaaagacatcttttgatattcttataaatggaacttacacagaagaaatagggatatgataaccactaaaattttgttttcaaaatcaaactaattcttacagcttttttattagttagtcttggaactagtgttaagtatctggcagagaacagttaatccctaaggtcttgacaaaacagaagaaaaacaagcctcctcgtcctagtcttttctagcaaagggataaaacttagatggcagcttgtactgtcagaatcccgtgtatccatttgttcttctgttggagagatgagacatttgacccttagctccagttttcttctgatgtttccatcttccagaatccctcaaaaaacattgtttgccaaatcctggtggcaaatacttgcactcagtatttcacacagctgccaacgctatcgagttcctgcactttgtgatttaaatccactctaaaccttccctctaagtgtagagggaagacccttacgtggagtttcctagtgggcttctcaacttttgatcctcagctctgtggttttaagaccacagtgtgacagttccctgccacacacccccttcctcctaccaacccacctttgagattcatatatagcctttaacactatgcaactttgtactttgcgtagcaggggcggggtggggggaaagaaactattatctgacacactggtgctattaattatttcaaatttatatttttgtgtgaatgttttgtgttttgtttatcatgattatagaataaggaatttatgtaaatatacttagtcctatttctagaatgacactctgttcactttgctcaatttttcctcttcactggcacaatgtatctgaatacctccttccctcccttctagaattctttggattgtactccaaagaattgtgccttgtgtttgcagcatctccattctctaaaattaatataattgctttcctccacacccagccactgtaaagaggtaacttgggtcctcttccattgcagtcctgatgatcctaacctgcagcacggtggttttacaatgttccagagcaggaacgccaggttgacaagctatggtaggattaggaaagtttgctgaagaggatctttgacgccacagtgggactagccaggaatgagggagaaatgccctttctggcaattgttggagctggataggtaagttttataagggagtacattttgactgagcacttagggcatcaggaacagtgctacttactgatgggtagactgggagaggtggtgtaacttagttcttgatgatcccacttcctgtttccatctgcttgggatataccagagtttaccacaagtgttttgacgatatactcctgagctttcactctgctgcttctcccaggcctcttctactatggcaggagatgtggcgtgctgttgcaaagttttcacgtcattgtttcctggctagttcatttcattaagtggctacatcctaacatatgcatttggtcaaggttgcagaagaggactgaagattgactgccaagctagtttgggtgaagttcactccagcaagtctcaggccacaatggggtggtttggtttggtttccttttaactttctttttgttatttgcttttctcctccacctgtgtggtatattttttaagcagaattttattttttaaaataaaaggttctttacaagatgataccttaattacactcccgcaacacagccattattttattgtctagctccagttatctgtattttatgtaatgtaattgacaggatggctgctgcagaatgctggttgacacagggattattatactgctatttttccctgaatttttttcctttgaattccaactgtggaccttttatatgtgccttcactttagctgtttgccttaatctctacagccttgctctccggggtggttaataaaatgcaacacttggcatttttatgttttaagaaaaacagtattttatttataataaaatctgaatatttgtaacccttta

SEQ ID NO: 12 - DNA, 1102 bp, Homo sapiens
  FCE1A; FcERI
acagtaagcaccaggagtccatgaagaagatggctcctgccatggaatcccctactctactgtgtgtagccttactgttcttcgctccagatggcgtgttagcagtccctcagaaacctaaggtctccttgaaccctccatggaatagaatatttaaaggagagaatgtgactcttacatgtaatgggaacaatttctttgaagtcagttccaccaaatggttccacaatggcagcctttcagaagagacaaattcaagtttgaatattgtgaatgccaaatttgaagacagtggagaatacaaatgtcagcaccaacaagttaatgagagtgaacctgtgtacctggaagtcttcagtgactggctgctccttcaggcctctgctgaggtggtgatggagggccagcccctcttcctcaggtgccatggttggaggaactgggatgtgtacaaggtgatctattataaggatggtgaagctctcaagtactggtatgagaaccacaacatctccattacaaatgccacagttgaagacagtggaacctactactgtacgggcaaagtgtggcagctggactatgagtctgagcccctcaacattactgtaataaaagctccgcgtgagaagtactggctacaattttttatcccattgttggtggtgattctgtttgctgtggacacaggattatttatctcaactcagcagcaggtcacatttctcttgaagattaagagaaccaggaaaggcttcagacttctgaacccacatcctaagccaaaccccaaaaacaactgatataattactcaagaaatatttgcaacattagtttttttccagcatcagcaattgctactcaattgtcaaacacagcttgcaatatacatagaaacgtctgtgctcaaggatttatagaaatgcttcattaaactgagtgaaactggttaagtggcatgtaatagtaagtgctcaattaacattggttgaataaatgagagaatgaatagattcatttattagcatttgtaaaagagatgttcaatttcaataaaataaatataaaaccaaaaaaaaaaaaaaaaaaaaaaaaaaaaaa

SEQ ID NO: 13 - DNA, 560 bp, Homo sapiens
  VIM
  modified_base (408)..(408): a, c, t or g
  modified_base (427)..(427): a, c, t or g
  modified_base (507)..(507): a, c, t or g
ggaaaagtttggaagaggcagagaaatcctgctctcctcgccttccagcagcttcctgtaggtggcaatctcaatgtcaagggccatcttaacattgagcaggtcttggtattcacgaaggtgacgagccatttcctccttcatattctgaatctcatcctgcaggcggccaatagtgtcttggtagttagcagcttcaacggcaaagttctcttccatttcacgcatctggcgttccagggactcattggttcctttaagggcatccacttcacaggtgagggactgcacctgtctccagtactcagtggactcctgctttgcctggcgcaaggcgtcaattgtcctgttggcagcctcagagaggtcagtcaacttggatttgtaccattcttctcgctactgcangttcttgacgagcacactntcatatagctgacgtacgtcacgcagggcacgcgtgacgtcaggcttggacacatgcacatcgatctggacatgctgtanctgaatctgagcctgcagcttctggattgcctcttcgtgagttcgtcaaaaag

SEQ ID NO: 14 - DNA, 602 bp, Homo sapiens
  modified_base (477)..(477): a, c, t or g
  modified_base (481)..(481): a, c, t or g
  modified_base (534)..(535): a, c, t or g
  modified_base (540)..(540): a, c, t or g
  modified_base (558)..(558): a, c, t or g
  modified_base (583)..(583): a, c, t or g
  modified_base (593)..(593): a, c, t or g
  modified_base (601)..(601): a, c, t or g
gctgataattcaaattctgtactttggcaagcaaaagaggtacaacatcaccttggagttttacaatttaataatgcatactttaaaattcatgataaatcatggaaccccactatactcactaattcaactattgatttctttttgagcaactgactttatgatttatccttaaaagtaaggaagtataccagaaggcaaaaggataaatccacccataaatactagagtctaagttattttcctgaaaaggtgaaaagggaatttctggtctttatcttttcccttatcaccttcaatcacacactttacactgaaattacttgtctctgtctcttcaacaatatactctgaaactttgtttaatatactttttgctatttctgcatatgggagaccaatcttggattcccaccaaaaatggcctgggtaccaaaatacttcttcattcagtagtttggtgtaagtgttgggtgnatgngctatatgggcattttaactccaagaatgctcccttagaaatacccagatgcnntatgnatataaaaatcattgggnccttaagcttgctcaaaaaactccnaaacttctgnatagcccnt

SEQ ID NO: 15 - DNA, 1440 bp, Homo sapiens
  CCNC
ggggcggggcgcccagcgggatgcggtgaagggcgagcggcgcggcggctgcgatgagtgcctctgcggccaccggggtcttcgtgctgtccctctcggccatcccggtcacctatgtcttcaaccacctggcggcccagcatgattcctggactattgtaggggttgctgccctcatcctgttcctggtagcactgctggctcgtgtcctcgtcaaaagaaaaccaccccgggacccactgttctatgtgtatgcagtttttggatttaccagcgtggtgaacctcatcataggactggagcaagatggaatcattgacgggttcatgacacactacttgagagagggtgaaccgtatctgaacaccgcatatgggcacatgatctgctactgggatggctctgctcattatctgatgtacctggtgatggtggcagccatagcatgggaggaaacttatagaaccattggcctatattgggttggatctattattatgagtgttgttgtttttgtgccaggaaacattgtagggaagtatggaacacgaatttgccctgcttttttcttaagcataccatatacttgtcttcctgtctgggctggtttcagaatctataatcagccatcagaaaattataattacccctcaaaggttattcaagaagcccaagcgaaagacctgctgagaagaccatttgatttaatgttggttgtgtgtctcctcctggcaactggattttgcctgttcagaggtttgattgctttggattgcccatctgagctctgccgattatatacgcaatttcaagagccctatctaaaggatcctgctgcttatcctaaaattcagatgctggcatatatgttctattctgttccttactttgtgactgcactgtatggcttagtggttcctggatgttcctggatgcctgacatcacattgatacatgctggaggtctggctcaggctcagttttctcacattggtgcatctcttcatgctagaactgcttatgtctacagagtccctgaagaagcaaaaatcctttttttagcattaaacatagtatatggagttcttcctcagctcttggcctatcgttgtatctacaaaccagagttcttcataaaaacaaaggcagaagaaaaagtggaataaaaatattacttcatgttcctcctttctaaattactaacttttgttatactggtactgatattttgtcccatttcactctcttctcatacgtgagtacttaagaatatgtacattcttgctctgcactgtatgtgtgagctatatggtattgtgtaaattttttttgaaggaaaatggaaattcttgagaaacagtttgtttaaagaaatatattcaaaatcatttgtgaataaacttgatcatccatctcaaaaaaaaaaaaaaaaaaaaaaaa

SEQ ID NO: 16 - DNA, 1460 bp, Homo sapiens
  LAT1; pp36
accccatcttcatctggccttgactctgcccttgaggggcctaggggtgcagccagcctgctccgagctcccctgcagatggaggaggccatcctggtcccctgcgtgctggggctcctgctgctgcccatcctggccatgttgatggcactgtgtgtgcactgccacagactgccaggctcctacgacagcacatcctcagatagtttgtatccaaggggcatccagttcaaacggcctcacacggttgccccctggccacctgcctacccacctgtcacctcctacccacccctgagccagccagacctgctccccatcccaagatccccgcagccccttgggggctcccaccggacgccatcttcccggcgggattctgatggtgccaacagtgtggcgagctacgagaacgagggtgcgtctgggatccgaggtgcccaggctgggtggggagtctggggtccgtcctggactaggctgacccctgtgtcgttacccccagaaccagcctgtgaggatgcagatgaggatgaggacgactatcacaacccaggctacctggtggtgcttcctgacagcaccccggccactagcactgctgccccatcagctcctgcactcagcacccctggcatccgagacagtgccttctccatggagtccattgatgattacgtgaacgttccggagagcggggagagcgcagaagcgtctctggatggcagccgggagtatgtgaatgtgtcccaggaactgcatcctggagcggctaagactgagcctgccgccctgagttcccaggaggcagaggaagtggaggaagagggggctccagattacgagaatctgcaggagctgaactgagggcctgtggaggccgagtctgtcctggaaccaggcttgcctgggacggctgagctgggcagctggaagtggctctggggtcctcacatggcgtcctgcccttgctccagcctgacaacagcctgagaaatccccccgtaacttattatcactttggggttcggcctgtgtcccccgaacgctctgcaccttctgacgcagcctgagaatgacctgccctggccccagccctactctgtgtaatagaataaaggcctgcgtgtgtctgtgttgagcgtgcgtctgtgtgtgcctgtgtgcgagtctgagtcagagatttggagatgtctctgtgtgtttgtgtgtatctgtgggtctccatcctccatgggggctcagccaggtgctgtgacaccccccttctgaatgaagccttctgacctgggctggcactgctgggggtgaggacacattgccccatgagacagtcccagaacacggcagctgctggctgtgacaatggtttcaccatccttagaccaagggatgggacctgatgacctgggaggactcttttagttcttacctcttgtggttctcaataaaacagaacg

SEQ ID NO: 17 - DNA, 12568 bp, Homo sapiens
  IP3R2
cttccagctcccgccgggcggctgtgacggccgcagcgggtcgcagagcagggagtggacacggagtggggagcggagagggaaggaggaggaggaggagcaaaggtgttggagagaaaacttcagaaaggaacaggaaacctgccggggaggcggcggcggctgcggcttctctgggcgcctgggctgcgctcttcgcggggtgtccgcagctgcggcttggccccggtctggcttccccggcgcgcacgcacggctgagccgcgacgctcagtggctcgggccgtgccctccgccgcggctcttggccgctgtagtcccgcgatccgatccgcttctgccgcggcggctccctggagagagggcggcgagggcgcagggaagaagagggacgtccactgtggaacatgaagcagcatgactgagaaaatgtccagcttcctctacataggggacatcgtgtccctgtacgcggagggctcggtcaacggcttcatcagcaccttggggttagtggatgacagatgtgtggtgcacccagaggccggggaccttgccaaccctcccaagaagttcagagactgccttttcaaggtgtgccctatgaacagatattctgcccagaagcaatattggaaagcaaagcaagccaaacaagggaaccacaccgaggcagccttgctgaagaaactacagcacgctgcagaactggaacaaaaacaaaatgaatcggagaataagaaactgttgggagaaattgtaaaatacagtaatgttatacaactactgcatataaaaagcaacaaatatcttactgtcaacaagagattacctgctttactggagaagaatgccatgcgtgtgtccttggatgctgcaggaaatgaagggtcttggttttatattcatccgttctggaaactgagaagcgagggtgacaatattgttgtaggagataaagttgttttgatgcctgtgaatgcagggcagccactacatgccagcaacatagagcttcttgataacccagggtgtaaagaggtgaatgctgtcaattgcaacaccagctggaaaatcactttattcatgaaatatagttcctatcgagaggatgtattaaaaggaggggacgttgttagattatttcatgcggaacaagagaagtttttgacttgtgatgaatatgagaaaaaacagcacattttccttcgtacgaccttgcgccaatcagctacttctgctactagttctaaagcactctgggaaatagaggtggttcatcatgacccatgccgtgggggtgcaggacagtggaacagcttgttcagatttaagcatcttgcaactggaaactatttagctgcagagcttaatcctgattatcgagatgcccaaaatgaaggaaaaaatgtgagagatggagtccctccaacttcaaagaaaaaacgccaggcaggggagaagatcatgtatactttggtttcagtcccgcatggcaatgacattgcatccctttttgaactagatgccacaactcttcagagagctgactgcctggttccaaggaactcatatgttcggttaaggcatttatgcaccaacacatgggtaaccagtactagtatccccatagacacagatgaagagaggcctgttatgttaaagattggaacctgccaaaccaaagaagataaagaagcgttcgcaatcgtgtctgttccactgtctgaagttcgagacttagactttgccaatgatgccaataaagtactagcgaccacagttaaaaagctagaaaacggcacaataactcagaatgaaaggaggtttgtaaccaaattattggaagatctcatattctttgttgctgatgtgcctaataatggacaagaagttctggatgtggttatcactaagccaaaccgagagcgtcaaaaattgatgagggaacaaaacatactggcacaggtatttggaattcttaaagcaccctttaaagagaaagcaggagaaggctcgatgctgagacttgaagatctgggggatcaaagatatgcaccctacaagtacatgctgcggctctgttaccgcgtcctgagacactcgcagcaggattaccggaaaaatcaggaatatattgctaagaatttctgtgtcatgcagtcccagattggctatgatattttggcagaagatactatcacagctttgttgcacaacaacagaaaactactagagaaacatatcacagcaaaagaaatagaaacatttgtcagtttactcaggagaaatcgggagccaaggtttttggattatttgtcagatctgtgtgtgtctaataccactgctatccctgtaactcaagaactcatctgtaaatttatgttgagtccaggcaatgcagacattctcattcaaactaaggtggtctcaatgcaagcagacaaccccatggagagctccatcctttcagatgacattgatgatgaagaagtttggctctattggattgacagcaacaaggaacctcatggcaaagctatcaggcaccttgctcaagaggcaaaagaaggcaccaaagctgacttagaagttcttacctattacaggtaccagctaaacctctttgcaaggatgtgcttggatcgccagtatctggccataaaccagatttctacacagctgtctgtagacctgatcctgcggtgtgtgtcggatgagagcctgccgttcgacctccgagcgtccttctgtcgcctcatgctccacatgcacgttgaccgggatccccaggagtccgtggtgcctgttcgctatgccaggctctggacagaaatccccacaaagatcacaattcatgaatatgattctataacagactcttccagaaatgatatgaagaggaaatttgccctgacaatggaatttgttgaagaatatttgaaagaagttgtaaaccagccctttccttttggggataaagaaaaaaataaactgacatttgaggtggtccacttggctcggaatcttatatactttggattttatagtttcagtgagttattaaggctaacaagaacacttctggctattttagacattgtacaggcccccatgtcatcatactttgaaagattaagcaaatttcaagatggaggaaacaatgtgatgagaaccattcatggggtgggagagatgatgacccagatggtactcagtagaggctccatcttccccatgagcgtgccggatgtgccacccagcatccacccgagcaagcaagggagccccaccgagcacgaggatgtgactgtgatggacaccaagctgaagatcattgagattttgcagtttatcctgagtgtcagactggattataggatctcatatatgctgtcaatatataagaaggagtttggagaggacaatgacaatgcggagacatctgccagtggatctccagacactttactaccatcagctattgttcctgatatagatgaaattgcagctcaggcagaaactatgtttgcgggaagaaaagaaaaaaatccagttcaacttgacgatgaaggaggcaggacgtttttacgggtcctcattcatctgatcatgcacgactacccgcctttgctgtctggagccctgcagctgttgtttaagcacttcagccagagggcagaggttttacaggcatttaagcaggtgcaattactggtgtctaatcaagacgtagataactacaagcaaatcaaggcagatctagaccagcttcgactgacagtagaaaagtctgagctatgggtggagaagagcagcaactatgagaatggagaaataggggaaagtcaagtgaaaggtggtgaagagccaattgaggaatcaaacattttaagtccagtgcaggatggaacaaagaaacctcagattgacagcaacaagagcaataactaccggattgtaaaggagattttgatcaggctaagtaaactctgtgtgcagaataaaaagtgtcggaatcaacatcaacgattactgaaaaatatgggggcgcattcggtggtgttggatcttctgcagataccctatgaaaagaatgatgaaaagatgaatgaagtaatgaatctagcccatacatttctgcagaatttctgtcgaggaaatccacagaatcaagttcttcttcataaacatctgaatttgtttttaactccaggtctccttgaagcagaaaccatgcggcacatcttcatgaacaattaccatctgtgcaacgaaattagcgagagagttgtacaacactttgtgcactgcattgagacacatggccgccacgtggagtacctgaggtttttgcaaacaattgtaaaagcagatggtaaatatgtgaagaaatgccaggatatggtaatgacagagttgataaatgggggtgaagacgtgctgatattttacaatgatagagcatcatttccaatccttctccatatgatgtgttcagagagagaccgaggggatgagagtggccccttagcctaccacatcaccctggtggagttgctggcagcatgcacagaggggaaaaatgtctacactgaaatcaagtgtaattcccttctcccgctggacgacatagtgagggtggtgacccatgacgactgcatccctgaggttaaaattgcttatgtgaactttgttaatcactgttatgttgacactgaagtggaaatgaaagaaatctatacaagtaaccacatttggaaattatttgagaacttcttggtggatatggcaagggtttgcaacacaactacagacaggaaacatgcagacatctttttggaaaagtgtgttactgagtcaataatgaatattgtgagcggcttctttaattctcccttttcagacaatagtaccagcctccagacacatcagccagtttttattcagctactgcaatctgccttcagaatttacaattgcacctggccaaacccagcgcagaaagcctcagtggaatcctgtatcagaactttggctgaagtggcaaaaaatcgtggaattgccattccagtggatttggacagccaagttaatactcttttcatgaagagccattcaaatatggtgcagagagcagcaatgggttggagactatcagctcgctctgggccacgctttaaggaagctcttggagggcctgcttgggattacagaaatattattgaaaagttacaggatgtagtggcctccttggagcaccagttcagcccaatgatgcaggctgaattctcagtgttggttgatgtattgtacagtccagaactgctgttccctgagggaagcgatgcaagaataagatgtggcgctttcatgtcgaagttgattaatcatacaaagaaactaatggagaaagaagaaaaactgtgcattaaaattcttcagacattacgagaaatgttagagaagaaagacagctttgtggaagagggtaacacattaagaaagatacttctgaatcgatactttaaaggtgattatagtattggtgtgaatggacacctatcaggagcctactccaaaactgcacaggtgggaggaagcttttctggacaagattcagataagatggggatatcaatgtcagacattcagtgtctgctggataaagaaggtgcatcagaacttgtcatcgatgttatagtgaacaccaaaaatgacagaattttttcagaaggcattttcctcggcattgccttgcttgaaggaggaaatacacaaacacagtattctttctaccagcagttgcatgaacaaaaaaagtcagaaaaattctttaaagttctctatgatcgaatgaaggctgctcagaaagaaataagatcaacagtgacagttaataccatagatttaggtaacaaaaaaagggacgatgacaatgaattgatgacatctggtccacgaatgagagtaagagattcaacactacatttaaaagagggaatgaaagggcaattaacagaagcttcttcagcaacatccaaagcatattgtgtatacagaagagaaatggatccagaaatagacattatgtgcacaggaccagaagcgggaaacactgaggaaaaatccgcagaggaagtaacaatgagtcccgcaattgccatcatgcagccaatactgagatttcttcagttactgtgtgagaatcacaaccgggaattgcagaacttcttgaggaatcaaaacaacaaaacaaattacaacctagtctgtgagacccttcagtttctggactgcatttgtggaagtacaaccggtggcctgggcctgttgggtctctacatcaatgagaagaatgtagcgctggtcaaccagaacctggagagcttgactgagtattgccagggcccttgccatgaaaatcagacctgtatcgctacacatgagtctaatgggattgatatcatcattgctttgattctgaatgacataaaccctcttggtaaataccgaatggacctggtgctccagctaaagaacaatgcatctaaacttttgctggccattatggaaagcagacatgacagtgagaatgcagaaagaattctttttaacatgagacccagagaactggtggatgtgatgaagaatgcctataaccaaggattggaatgtgaccatggggatgatgagggtggagatgatggtgtttctccaaaagatgttggacacaatatctatattctggcccatcagttggcccgccacaataaactgttgcagcagatgctcaaaccaggatcggatccagatgaaggagatgaagccttaaagtattatgccaaccacactgcacagattgagattgtccggcatgataggaccatggaacaaatagtttttcctgtccccaatatatgtgaatacctcactcgagaatccaagtgccgtgtgttcaatacaactgaaagggatgaacaaggaagtaaagtgaatgactttttccagcaaacagaagatctctacaatgaaatgaagtggcagaagaaaatcaggaataaccctgcactgttctggttctcgaggcacatctctctctgggggagcatttccttcaacctggctgtgttcatcaatttagctgttgctctcttctacccatttggggatgatggagatgaaggtacactttctccattgttctcggttcttctttggatagcagttgcgatctgcacatctatgctgtttttcttctccaagcctgtgggtattcggccgtttcttgtatcaataatgctcagatcaatatatacaataggtcttgggcctacattaatacttcttggtgcagctaatctttgtaataaaattgtttttctggtgagttttgttggaaatcgtggcacgttcacccgtgggtaccgagcagtcatcctggatatggcctttctctatcacgtggcgtatgtcctggtttgcatgctgggcctttttgtccatgaattcttctatagcttcctgctttttgatttggtgtacagggaagagactttgctgaatgtcataaaaagtgtcacacgaaatggccgctctattattctaactgcagtcctggctctcatcctcgtctacctgttttccattattgggttcctttttttgaaggatgacttcactatggaagttgataggctgaaaaaccgaactcctgttacaggcagtcatcaagtgcctactatgactttaactaccatgatggaagcatgtgccaaggagaactgttcacccacaattccagcttcaaatacagctgatgaagagtatgaagatggaattgaaaggacgtgtgacactctccttatgtgcattgtcaccgtgctgaaccagggcctcaggaatggcggtggtgtgggggatgtgctaagaaggccatcgaaagatgagcccttgtttgctgcccgagtggtttatgaccttcttttttatttcattgttatcattattgttctgaacttgatttttggtgttatcatcgatacttttgctgatctcagaagcgaaaaacagaaaaaagaagaaattctaaagacaacttgtttcatctgtggacttgagagagacaagtttgataataaaacggtttcatttgaggagcacattaagtcagaacacaatatgtggcattatttgtacttcatagtcctggtgaaagttaaagacccaacagaatacactggacctgaaagttatgtggctcaaatgattgtggagaagaatttggattggtttcctcggatgcgagccatgtccctcgttagcaatgaaggcgacagtgagcaaaatgaaattcggagccttcaggagaagttggaatcgaccatgagtctggtcaaacagctgtcgggtcagctggcggagctcaaggagcagatgacagaacaaaggaagaataagcagagactgggcttcctcggatcaaacacaccccatgtgaatcatcacatgccaccacactgataccatggggggaagccgtgactagcctttcatcagtgtcctgcctgatcactgaataaagaactgagatggaggggagtgaacagtgcctattgttgaaaagttaaaaacaaccaagtgccaagatgttgagtgggttagctccgagaacaatttataactgtgttttcatggttgcgaagacctaacctcaaatgcatctgctagaaagcgtacatcacacattcgcaatgcatcaggaagaaaaggcttgcccaaaaggctggagagggcagggagcggcaggatggaaggagacacggggcagggagaactctcttctgctaaatcgataggagtcagttttgtcttaaatgctgactacagccactgacatggttggctggaatttctttcttttaattgtggcatataggtttgtgacacaagaagtcatactttggtggctaagttttactaaggaaaataactgaaaagattaaaagtgagagctgaaaagagaaatgataatgcttccaaactgtagctgtcacagggcaatttctttatttataacatgaagcacaatggatttacagctctaggaacttagtactttggagcttttgcctctcacactgacaacataacaggatgtgattgccttctctgggattcagacaggctctgtcaatgtggagcacaaaaggagattttcatataacttgttaaaaacatgttctaagtcatgtataggctaagattttaagaagatctgggggaataaaaagccaacagtaagccccaggaaagggttttttgagaccatatgtatgctattaaaatatattgagattaatacatgaaaatgcttaaaagtgataggaattattgagaaacttatgatggtggcattgccttttataaacatggagtgaaagccatttgactcaacgtttgctgtgcttaaagaattgcttcaggacccgagcgtttttatgtatgctgttcctgcagttaggaaaaaaaaatccaagaaatgtattgaatactcaagaaaatgccacatttcaattacatatttaaaactgtatctgtaagggcttttcaaaatgtagcaagataaaaatctcttattcaaattgtttttgtattaaatcatgcactcagaatttgtcgagggagagaataacctggtgtgttcaggttattcttagagactacacatttggaatagcagagcaaaatatggataatgaaagtgttgggaaaaaagtgatgtgacagggagtgaagacacttgataccagactctgggagatactctgcaagttgacctggcctctcccccacaggaacaaaacactgcctccagagtctttaaattctcagttatcaacgccaaggtttaaggtctagatagggtttgctatagggtttgctctgacaatttttaaagcttttggattgttctaacatagcttaagctattggttcctaaaaatcccaaatcaagatctatgtagaatataaaggaagcctgaaccaatccttccacatactgttaagatgtagacttggaacaaagctgttgggacccagagcaatgaatttttgaactgaagctactggtactccccagcaccacctcatactaagaattcctcactctgacatgacagtattttttctgaccaggagctgaaagaccctgacattcatgatccaaagatataagaaattttgatatgtctgcatgcagcacagaactttgaacctaggaggcagtcaataaatacatgagaaattcagctgtcattcagttactcttaattctttataaaactttaaatgataccacatatttgtttgtttaaaatggctttcccaaaatcaaagtagactaaagcagccatctttaaaatccaggatcatcaatgctattaacagtatcaggtaaaaagtacactttaaaatattttaatcaggcagagttttatggatagagaatagaagagaaaggtagtaaatattgaacatattccaatataggaacctatctctgttttagtacaaaatatttctgacatctgaactagaggtcaagagaataaattcatttgtatacatctgagcaacctgtctttcagatgataaagtatctagccttttctgacaccataatagttcattttgtagggaataagccattaggtgtatataattgctttctagaaatgacctaatgtccccaaccactttgtagtggcagatcactgtttcacagcatattttctcccaaggaaagtattcaaaagagactgcaactaacaagactcttatttcatcaaaatttaaatatttctgagttgtatttttaatgcctctttcttttctgcctaaatgcttagaaattataaagcaaaaaaaaaaaaaacagcaacaaaaaatcgaagcagacaaaaaaggcacttttcagaacatcaaattcctaatgaagaagaggagaagataatggggaaatttgacatttgatataaatttatatttgttatgtgtatgtttgttaatgcaactggaatatttgacttaggtgagtatcagttaacatccttgtatttatatagtgacatcaaaataaatgcaatcatcttgaactttgatgttaagggagattttgaaaaaatatttagttatttcaaattcatattggttcaaaagtatcagtttctgctgaataatatttttaatttcaaaagggttttgttccctctgtgctccattctgaggctcaagagcttaatgccagtatgttttctgagttaaaataacacttttagatgagaaaatgcttgtatcatacagggctataatataaataaataaattgtatgtatgcaaaatttatcatattttctaccccttaaaaaattaagttagaaataagcttattttcttgcacatcaatatttttctgttggtaaagaggacacaatttctagtagattgttaataacatcaggaagatatttctttcgtcagaactaattgtgtgcttattcccatattctcagctcataactccctgttttggctgctctctttattttacaattgtttcattgcaaacagcaaggcagtatagcccacactcagccactagcccccagtccccaggactgagaatgagtggggaggctggggagttggtgagagaaggtggagatagggatttctgcttcccagtactctatcattagagaaaaggaggggtaaatattagctaagaagaagaaaaaagcttattcttcagggacccagtagattggacgtaagcaagtaaatattgcacaggcatcatgatgtaatagttgatggaccccagagatacccctcacccatgcagagaacaaagctgtgtggaagagcaactaccataagatggtgtgttccttccagcggctgttaaagccatcctgaataacaaatcagctattcctacctacagacccattccaatatgctgtgatacacgacacggtgcaccgcagaggagacagacatcttcagcacaaacacagatgcctgcaggagcttggcaagtcactaaattgcatgaaattgtgaggtgcacaccaaatgcagggatgggggaggccgtgggaagctctgtattctcaaaatttgacagctaattccggtttttagaaaatgcctgaggccagtagaggccctctagtcactcactgctgctgtttctgatataattattgagaaagctatctcacttaatagaagaaaacacgcactatcaaaaccagatagcctaacgtgcatgtgaaaatcgagaaagctgaaaacaaatccaggtacccttctctgaactggagtgtttccacagacttgaataatttatgaaattatcacaccagtatttctcatatcaccaagaagactttctctcctgcagtagaggattgttatatttgcctaaaaaacacgattccaatatatgacaagggcagataatttataagtgaatgttaataaaattggatgtgtataa

SEQ ID NO: 18 - DNA, 2158 bp, Homo sapiens
  SA; SAH
cggattgtcagactgctcctccctcttctttagactgccacgaggaaaaagcagatgtgagaactcaaggttcagggctgctcttctaagaaacaagtctgccataatctccatctgtgttggaatctgttaactaatgaactggtctctgtgcaaatcctgagtgctaaagcttccaacaagactgatgctagctcgtgtcaccaggaagatgctacgtcatgccaagtgttttcagcgcctagcaatttttggttctgtgagggcactgcataaagataatagaacagcaacccctcagaatttctccaactatgaatccatgaaacaggacttcaaactggggattccagagtatttcaactttgctaaagatgtcctggaccaatggactgataaggaaaaggctggaaagaaaccttcaaatccagccttctggtggatcaacagaaatggagaagagatgcgatggagttttgaggaactgggatctctgtccagaaaatttgccaatatactttcagaagcctgttccctacaaagaggagatcgggtaattctgattctgcccagggtcccagagtggtggcttgcaaatgtggcctgtctgcgaacagggacagttttaattccaggaaccactcagctgacccagaaagacattctctacagactacaatcttcaaaagcaaactgcattatcaccaatgatgttttagccccagcagtagacgctgttgcatccaaatgtgaaaatctgcactccaagctgattgtatcagagaactccagagaggggtgggggaacctcaaggagttgatgaaacatgccagtgacagccacacctgtgtgaagacaaaacacaatgagatcatggccatattctttaccagtggaacaagtggatatccgaaaatgactgcacacacccacagcagttttggtttaggattatctgtaaatggaaggttctggctagatttgacaccctcagatgtgatgtggaatacctcagatacgggctgggcaaagtctgcatggagtagtgttttttctccgtggatccagggagcatgtgtattcacacaccatttaccccgttttgagccgacttctatcttgcaaacactctccaagtaccccatcacagtcttctgttcagcaccaactgtataccgaatgcttgtacagaatgatataaccagctataagtttaaaagcttaaagcactgtgtgagtgctggggaaccaattacccctgacgtgactgaaaaatggagaaacaagacgggcctggatatctacgaaggatatggacagactgaaacggtgctaatctgtggaaattttaagggaatgaaaattaaacctggctcaatgggaaaaccttctcctgctttcgatgttaagattgtagatgtaaatggcaatgttctacctcctggacaagaaggagatattggcattcaagttctacccaaccgaccatttggcctttttactcattacgtagataatccttcaaaaacagcttcaactctacgaggcaatttctatatcactggggacagaggatatatggataaagatgggtatttctggtttgttgcaagagcagatgatgtcatattatcctctggctatcgaattggaccatttgaggtagaaaatgccctgaatgaacacccttcagttgcagagtcagctgttgtcagcagcccagaccccatcagaggagaggtagtaaaggcttttgtcgttctaaatcctgattacaagtcacatgatcaagaacaactaataaaggagattcaggagcatgttaaaaaaactacagcaccttacaaatatcccagaaaggtagaatttattcaagagctgccaaagactatcagtgggaagacaaaaagaaatgaactgaggaagaaagaatggaagacaatttaaagttgtttcattaattaccatatctataaaacaaacatagtatctgtcaatctctagaaaccacaagatgatggagaggtcataaaaactgtggtagtatgcttagaaactgttgatttaaaatatcttgtggttatgatatcagaggctaaattttgaaataaaatatttggcaaattcctccaaaaaaaaaaaaaaaaaaaaaaaaaa

SEQ ID NO: 19 - DNA, 1662 bp, Homo sapiens
  CLEC2C
caagagctccagcaaagactttcactgtagcttgacttgacctgagattaactagggaatcttgagaataaagatgagctctgaaaattgtttcgtagcagagaacagctctttgcatccggagagtggacaagaaaatgatgccaccagtccccatttctcaacacgtcatgaagggtccttccaagttcctgtcctgtgtgctgtaatgaatgtggtcttcatcaccattttaatcatagctctcattgccttatcagtgggccaatacaattgtccaggccaatacacattctcaatgccatcagacagccatgtttcttcatgctctgaggactgggttggctaccagaggaaatgctactttatttctactgtgaagaggagctggacttcagcccaaaatgcttgttctgaacatggtgctactcttgctgtcattgattctgaaaaggacatgaactttctaaaacgatacgcaggtagagaggaacactgggttggactgaaaaaggaacctggtcacccatggaagtggtcaaatggcaaagaatttaacaactggttcaacgttacagggtctgacaagtgtgtttttctgaaaaacacagaggtcagcagcatggaatgtgagaagaatttatactggatatgtaacaaaccttacaaataataaggaaacgtgttcacttattgactattatagaatggaactcaaggaaatctgtgtcagtggatgctgctctgtggtccgaagtcttccatagagactttgtgaaaaaaaattttatagtgtcttgggaattttcttccaaacagaactatggaaaaaaaggaagaaattccaggaaaatctgcacttgtggcttttattgccatgagctagaagcatcacaggttgaccaataaccatgcccaagaatgagaagaatgactatgcaacctttggatgcactttatattattttgaatccagaaataatgaaataactaggcgtggacttactattaattgctgaatgactaccaacagtgagagcccttcatgcatttgcactattggaaggagttagatgttggtactagatactgaatgtaaacaaaggaattatggctggtaacatagtttttagtctaattgaatcccttaaactcagggagcatttataaatggcaaatgcttatgaaactaagatttgtaatatttctctctttttagagaaatttgccaatttactttgttatttttccccaaaaagaatgggatgatcgtgtatttatttttttacttcctcagctgtagacaggtccttttcgatggtacatatttctttgcctttataatcttttatacagtgtcttacagagaaaagacataagcaaagactatgaggaatatttgcaagacatagaatagtgttggaaaatgtgcaatatgtgatgtggcaaatctctattaggaaatattctgtaatcttcagacctagaataatactagtcttataataggtttgtgactttcctaaatcaattctattacgtgcaatacttcaatacttcatttaaaatatttttatgtgcaataaaatgtatttgtttgtattttgtgttcagtacaattataagctgtttttatatatgtgaaataaaagtagaataaac

SEQ ID NO: 20 - DNA, 1477 bp, Homo sapiens
  ZMYND1; ZNFN3A1; FLJ21080; MGC104324; bA74P14.1
gtggattttagagatacctcccctccttctgctcagctgccttgcagtaattaaactctttctctgctgcaacacccctactgttctccgtgtattggcttttctgggcagcaggaaggaaaagctgatgcgatgctctcagtgccgcgtcgccaaatactgtagtgctaagtgtcagaaaaaagcttggccagaccacaagcgggaatgcaaatgccttaaaagctgcaaacccagatatcctccagactccgttcgacttcttggcagagttgtcttcaaacttatggatggagcaccttcagaatcagagaagctttactcattttatgatctggagtcaaatattaacaaactgactgaagataagaaagagggcctcaggcaactcgtaatgacatttcaacatttcatgagagaagaaatacaggatgcctctcagctgccacctgcctttgacctttttgaagcctttgcaaaagtgatctgcaactctttcaccatctgtaatgcggagatgcaggaagttggtgttggcctatatcccagtatctctttgctcaatcacagctgtgaccccaactgttcgattgtgttcaatgggccccacctcttactgcgagcagtccgagacatcgaggtgggagaggagctcaccatctgctacctggatatgctgatgaccagtgaggagcgccggaagcagctgagggaccagtactgctttgaatgtgactgtttccgttgccaaacccaggacaaggatgctgatatgctaactggtgatgagcaagtatggaaggaagttcaagaatccctgaaaaaaattgaagaactgaaggcacactggaagtgggagcaggttctggccatgtgccaggcgatcataagcagcaattctgaacggcttcccgatatcaacatctaccagctgaaggtgctcgactgcgccatggatgcctgcatcaacctcggcctgttggaggaagccttgttctatggtactcggaccatggagccatacaggatttttttcccaggaagccatcccgtcagaggggttcaagtgatgaaagttggcaaactgcagctacatcaaggcatgtttccccaagcaatgaagaatctgagactggcttttgatattatgagagtgacacatggcagagaacacagcctgattgaagatttgattctacttttagaagaatgcgacgccaacatcagagcatcctaagggaacgcagtcagagggaaatacggcgtgtgtctttgttgaatgccttattgaggtcacacactctatgctttgttagctgtgtgaacctctcttattggaaattctgttccgtgtttgtgtaggtaaataaaggcagacatggtttgcaaaccacaagaatcattagttgtagagaagcacgattataataaattcaaaacatttggttgaggatgccaaaaaaaaaaaaaaaaaaaa

SEQ ID NO: 21 - DNA, 1443 bp, Homo sapiens
  RAD; RAD1; REM3
gtggctgcagcagcagcggcggcggaaaccctaaagtccgagtccggactacgagtgcgtggcctcctaatccggatcctagtcctgagcgtgtctgtgtgcgagtggacggtcccggacgcgatgaccctgaacggcggcggcagcggagcgggcgggagccgcggtgggggccaggagcgcgagcgccgtcggggcagcacaccctggggccccgccccgccgctgcaccgccgcagcatgccggtggacgagcgcgacctgcaggcggcgctgaccccgggtgccctgacggcggccgcggccgggacggggacccagggtcccaggctggactggcccgaggactccgaggactcgctcagctcagggggcagcgactcagacgagagcgtttacaaggtgctgctgctgggggcgcccggcgtgggcaagagcgccctggcgcgcatcttcggcggtgtggaggacgggcctgaagcagaggcagcagggcacacctatgatcgctccattgtagtggacggagaagaggcatcactcatggtctacgacatttgggagcaggacgggggccgctggttgcccggccactgcatggccatgggggatgcctatgtcattgtgtactcagtgacggacaagggcagcttcgagaaggcctcagaactgcgggtccagctgcggcgtgcacggcaaacagatgatgtgcccatcatcctcgtgggcaacaagagcgacctggtgcgctctcgtgaggtctcggtggatgagggccgggcctgcgcggtggtctttgactgcaagttcattgagacatcagcggcattgcaccacaatgtccaggcgctgtttgaaggtgtcgtgcgccagatacgcctgcgcagggacagcaaagaagccaacgcacgacggcaagcaggcacccggaggcgagagagccttggcaaaaaggcgaagcgcttcttgggccgcatcgtagctcgtaacagccgcaagatggcctttcgcgccaaatccaagtcctgccacgacctctcggttctctaggtcccacccgctcccactatggtgggagacgaacggaagggttggtgggctggcccagccaactgccccgggtgcctcagagcaggctcagactctgggtccctcggagctgccagccgggcacccccaacctcatggtcatggacagatagacagtgctgccctgcgaagtggctctcaggggccagtgagggctgggcccacagagatgcatgcgcaggctcatatgcgtcccaagcagccgcagcgcagccgccgggcaggcctgcgtgccgggagaggactctgccttttttcacagcccgggtgtgcctgccctggagggaggctcttcagtgcggtagctacttgtttacatgcagatttttgtaataaaggctatttcctgataaa

SEQ ID NO: 22 - DNA, 912 bp, Homo sapiens
  AZU; HBP; NAZC; AZAMP; CAP37; HUMAZUR
acagacctgccccgccatgacccggctgacagtcctggccctgctggctggtctgctggcgtcctcgagggccggctccagcccccttttggacatcgttggcggccggaaggcgaggccccgccagttcccgttcctggcctccattcagaatcaaggcaggcacttctgcgggggtgccctgatccatgcccgcttcgtgatgaccgcggccagctgcttccaaagccagaaccccggggttagcaccgtggtgctgggtgcctatgacctgaggcggcgggagaggcagtcccgccagacgttttccatcagcagcatgagcgagaatggctacgacccccagcagaacctgaacgacctgatgctgcttcagctggaccgtgaggccaacctcaccagcagcgtgacgatactgccactgcctctgcagaacgccacggtggaagccggcaccagatgccaggtggccggctgggggagccagcgcagtggggggcgtctctcccgttttcccaggtttgtcaacgtgactgtgacccccgaggaccagtgtcgccccaacaacgtgtgcaccggtgtgctcacccgccgcggtggcatctgcaatggggacgggggcacccccctcgtctgcgagggcctggcccacggcgtggcctccttttccctggggccctgtggccgaggccctgacttcttcacccgagtggcgctcttccgagactggatcgatggtgttctcaacaacccgggaccggggccagcctaggggggcctgtgacctcccatggagcccagccccgccctccacacctccggcgctccgcacccacctcccacggccccgcccctgcccccgctccggccagaggggccctggctgtaataaagaagccgatctctcctctg

SEQ ID NO: 23 - DNA, 1936 bp, Homo sapiens
  ADXR
gcttgtgggcgggcccgggcaggagcgggcttgccctgcggagcagtagctaggaacagatccacttgcaggttgctgttcccagccatggcttcgcgctgctggcgctggtggggctggtcggcgtggcctcggacccggctgcctcccgccgggagcaccccgagcttctgccaccatttctccacacaggagaagaccccccagatctgtgtggtgggcagtggcccagctggcttctacacggcccaacacctgctaaagcacccccaggcccacgtggacatctacgagaaacagcctgtgccctttggcctggtgcgctttggtgtggcgcctgatcaccccgaggtgaagaatgtcatcaacacatttacccagacggcccattctggccgctgtgccttctggggcaacgtggaggtgggcagggacgtgacggtgccggagctgcgggaggcctaccacgctgtggtgctgagctacggggcagaggaccatcgggccctggaaattcctggtgaggagctgccaggtgtgtgctccgcccgggccttcgtgggctggtacaacgggcttcctgagaaccaggagctggagccagacctgagctgtgacacagccgtgattctggggcaggggaacgtggctctggacgtggcccgcatcctactgaccccacctgagcacctggaggccctccttttgtgccagagaacggacatcacgaaggcagccctgggtgtactgaggcagagtcgagtgaagacagtgtggctagtgggccggcgtggacccctgcaagtggccttcaccattaaggagcttcgggagatgattcagttaccgggagcccggcccattttggatcctgtggatttcttgggtctccaggacaagatcaaggaggtcccccgcccgaggaagcggctgacggaactgctgcttcgaacggccacagagaagccagggccggcggaagctgcccgccaggcatcggcctcccgtgcctggggcctccgctttttccgaagcccccagcaggtgctgccctcaccagatgggcggcgggcagcaggtgtccgcctagcagtcactagactggagggtgtcgatgaggccacccgtgcagtgcccacgggagacatggaagacctcccttgtgggctggtgctcagcagcattgggtataagagccgccctgtcgacccaagcgtgccctttgactccaagcttggggtcatccccaatgtggagggccgggttatggatgtgccaggcctctactgcagcggctgggtgaagagaggacctacaggtgtcatagccacaaccatgactgacagcttcctcaccggccagatgctgctgcaggacctgaaggctgggttgctcccctctggccccaggcctggctacgcagccatccaggccctgctcagcagccgaggggtccggccagtctctttctcagactgggagaagctggatgccgaggaggtggcccggggccagggcacggggaagcccagggagaagctggtggatcctcaggagatgctgcgcctcctgggccactgagcccagccccagccccggcccccagcagggaagggatgagtgttgggaggggaagggctgggtccgtctgagtgggactttgcacctctgctgatcccggccggccctggcttggaggcttggctgctcttccagcgtctctcctccctcctggggaaggtcgcccttgcgcgcaaggttttagctttcagcaactgaggtaaccttagggacaggtggaggtgtgggccgatctaaccccttacccatctctctactgctggactgtggagggtcaccaggttgggaacatgctggaaataaaacagctgcaaccaagaaaaaaaaaaaaaaaaaaaaaaaaaaaaaaaaaaaa

SEQ ID NO: 24 - DNA, 3411 bp, Homo sapiens
  PKCB; PRKCB; PRKCB2; MGC41878; PKC-beta
gggcgagtgacagccccggctccgcgcgccgcggccgccagagccggcgcaggggaagcgcccgcggccccgggtgcagcagcggccgccgcctcccgcgcctccccggcccgcagcccgcggtcccgcggccccggggccggcacctctcgggctccggctccccgcgcgcaagatggctgacccggctgcggggccgccgccgagcgagggcgaggagagcaccgtgcgcttcgcccgcaaaggcgccctccggcagaagaacgtgcatgaggtcaagaaccacaaattcaccgcccgcttcttcaagcagcccaccttctgcagccactgcaccgacttcatctggggcttcgggaagcagggattccagtgccaagtttgctgctttgtggtgcacaagcggtgccatgaatttgtcacattctcctgccctggcgctgacaagggtccagcctccgatgacccccgcagcaaacacaagtttaagatccacacgtactccagccccacgttttgtgaccactgtgggtcactgctgtatggactcatccaccaggggatgaaatgtgacacctgcatgatgaatgtgcacaagcgctgcgtgatgaatgttcccagcctgtgtggcacggaccacacggagcgccgcggccgcatctacatccaggcccacatcgacagggacgtcctcattgtcctcgtaagagatgctaaaaaccttgtacctatggaccccaatggcctgtcagatccctacgtaaaactgaaactgattcccgatcccaaaagtgagagcaaacagaagaccaaaaccatcaaatgctccctcaaccctgagtggaatgagacatttagatttcagctgaaagaatcggacaaagacagaagactgtcagtagagatttgggattgggatttgaccagcaggaatgacttcatgggatctttgtcctttgggatttctgaacttcagaaagccagtgttgatggctggtttaagttactgagccaggaggaaggcgagtacttcaatgtgcctgtgccaccagaaggaagtgaggccaatgaagaactgcggcagaaatttgagagggccaagatcagtcagggaaccaaggtcccggaagaaaagacgaccaacactgtctccaaatttgacaacaatggcaacagagaccggatgaaactgaccgattttaacttcctaatggtgctggggaaaggcagctttggcaaggtcatgctttcagaacgaaaaggcacagatgagctctatgctgtgaagatcctgaagaaggacgttgtgatccaagatgatgacgtggagtgcactatggtggagaagcgggtgttggccctgcctgggaagccgcccttcctgacccagctccactcctgcttccagaccatggaccgcctgtactttgtgatggagtacgtgaatgggggcgacctcatgtatcacatccagcaagtcggccggttcaaggagccccatgctgtattttacgctgcagaaattgccatcggtctgttcttcttacagagtaagggcatcatttaccgtgacctaaaacttgacaacgtgatgctcgattctgagggacacatcaagattgccgattttggcatgtgtaaggaaaacatctgggatggggtgacaaccaagacattctgtggcactccagactacatcgcccccgagataattgcttatcagccctatgggaagtccgtggattggtgggcatttggagtcctgctgtatgaaatgttggctgggcaggcaccctttgaaggggaggatgaagatgaactcttccaatccatcatggaacacaacgtagcctatcccaagtctatgtccaaggaagctgtggccatctgcaaagggctgatgaccaaacacccaggcaaacgtctgggttgtggacctgaaggcgaacgtgatatcaaagagcatgcatttttccggtatattgattgggagaaacttgaacgcaaagagatccagcccccttataagccaaaagcttgtgggcgaaatgctgaaaacttcgaccgatttttcacccgccatccaccagtcctaacacctcccgaccaggaagtcatcaggaatattgaccaatcagaattcgaaggattttcctttgttaactctgaatttttaaaacccgaagtcaagagctaagtagatgtgtagatctccgtccttcatttctgtcattcaagctcaacggctattgtggtgacatttttatgtttttcattgccaagttgcatccatgtttgattttctgatgagactagagtgacagtgtttcagaacccaaatgtcctcaggtagtttggagcatctctatgagatgggattatgcagatggcctatggaaaatgcagctgcataattaacacattatcaaagtcctcttacaatttattttccgcagcatgtcagctaagtagacccaatggggagagaaaatgcctgctttctttccctctttttctgcactgccatattcacccccaaccatccaatctgtggataattggatgttagcggtactcttccacttccgggcctggagcttggcttgtatccaagtgtatggttgctttgcctaagaggaatccctctatttcacctgttctggaggcaccagaccttgaaaagaacatgctcaaaataaaatgttatctgttatttttgtaaactcaaagttaagatgatcaaagttctaaaattccaagaatgtgcttttagacggtctcaatctaaaagcacttcaaggggtcaaagggcaaccagcttgggtgctacctcagtgttgtagtttctgatactttatgtctttgctcaccctcatccccaaactacttgaaaagggcatttggcaccactctctgaaacaacacagtcactctagcaaggcccccaaagggccctggttttacattacatttcaaactttatttgctttggggttttgtttctgttgttgttcaaatgcaaaaaaaagaaaaaaaaagaaaaaaaaaggtgactcacattgttacacatgctttaaaatatgtattcaaatgttattaaccacaatgacgacctgctttgatttaaccaagaagacggctgcggagcctagcagactcaggcctgtgggaatgggatttgttacaaatctaggtttgttactggcttcagaaagctaattaagtgctctgaaaaagacaccgtttcttgaaacaaagatggttgtattcctcactttgatgttgttttgcaagatgtttgtggaaatgttcatttgtatctggatctctgttatgtgccatttttcttctagcatcgagatacaataaaaaaaaaaaaaaagaaaaaaaaaaaaaaaaaaaaaaaaaaaa

SEQ ID NO: 25 - DNA, 963 bp, Homo sapiens
  BP4; NBK; BIP1
gacacgaagcctcccgggtggcttacagacgctgccagcatcgccgccgccagaggagaaatgtctgaagtaagacccctctccagagacatcttgatggagaccctcctgtatgagcagctcctggaacccccgaccatggaggttcttggcatgactgactctgaagaggacctggaccctatggaggacttcgattctttggaatgcatggagggcagtgacgcattggccctgcggctggcctgcatcggggacgagatggacgtgagcctcagggccccgcgcctggcccagctctccgaggtggccatgcacagcctgggtctggctttcatctacgaccagactgaggacatcagggatgttcttagaagtttcatggacggtttcaccacacttaaggagaacataatgaggttctggagatccccgaaccccgggtcctgggtgtcctgcgaacaggtgctgctggcgctgctgctgctgctggcgctgctgctgccgctgctcagcgggggcctgcacctgctgctcaagtgaggccccggcggctcagggcggggctggccccacccccatgaccactgccctggaggtggcggcctgctgctgttatctttttaactgttttctcatgatgcctttttatatttaaaccccgagatagtgctggaacactgctgaggttttatactcaggttttttgttttttttttattccagttttcgttttttctaaaagatgaattcctatggctctgcaattgtcaccggttaactgtggcctgtgcccaggaagagccattcactcctgcccctgcccacacggcaggtagcagggggagtgctggtcacacccctgtgtgatatgtgatgccctcggcaaagaatctactggaatagattccgaggagcaggagtgctcaataaaatgttggtttccagcaaaaaaaaaaaaaa

SEQ ID NO: 26 - DNA, 510 bp, Homo sapiens
  P53TG1; TP53TG1; P53TG1-D; H_RG012D21.9; TP53 target gene 1
ctccagtgggcgtcttgggccccggctctattctgggctgcgggcctgggaagggctcgccgggtgccaaatgagctgtcctaactctgcggggctgcagcttcctgcatgatgctggggagcttggcgcctgacccaggatctagaaggcactctgggcaggccgcgctccgcccacgaaggtacccaaccctctgggatagatgcaggaagcgatggttaagacccattttcacccaacttctcgccgcaggtttaaccaccaaggactctgagagctggcaggtctgagtaaccctggtaacaattctcttcaccttatcaaaacctgagctaaaaccaatgcatcagctgatgatgacagcagagagtggcagggctgaggacccaaagtcatttcccaggctggcggagaataaactgccagggagaagaatgagaagacaggagacaaactgtttggaaagctaaatcttccctcttaatgaataaaggtttttgccttgtctt

SEQ ID NO: 27 - DNA, 2166 bp, Homo sapiens
  FAM31A; FLJ38464; KIAA1608; RP11-230L22.3
cgcgcgccgggcacgcgcgccggcgaccatggcgttcgccgggctggagcgagtacattaacccctggaggcggcggcggcggcgagggagcgagcctcgagcgggcgggccccagcctgagggaagggaggaaggggcggggagagcgccagagggaggccggtcggccgcgggcgggcgggcagcgcagcgccgagcggggcccgcgggcccatgaggaggcctggggaccatgggctccaggatcaagcagaatccagagaccacatttgaagtatatgttgaagtggcctatcccaggacaggtggcactctttcagatcctgaggtgcagaggcaattcccggaggactacagtgaccaggaagttctacagactttgaccaagttttgtttccccttctatgtggacagcctcacagttagccaagttggccagaacttcacattcgtgctcactgacattgacagcaaacagagattcgggttctgccgcttatcttcaggagcgaagagctgcttctgtatcttaagctatctcccctggttcgaggtattttataagctgcttaacatcctggcagattacacgacaaaaagacaggaaaatcagtggaatgagcttcttgaaactctgcacaaacttcccatccctgacccaggagtgtctgtccatctcagcgtgcattcttattttactgtgcctgataccagagaacttcccagcatacctgagaatagaaatctgacagaatattttgtggctgtggatgttaacaacatgttgcatctgtacgccagtatgctgtacgaacgccggatactcatcatttgcagcaaactcagcactctgactgcctgcatccacgggtctgcggcgatgctctaccccatgtactggcagcacgtgtacatccccgtgctgccgccgcatctgctggactactgctgtgctcccatgccctacctcataggaatccatttaagtttaatggagaaagtcagaaacatggccctggatgatgtcgtgatcctgaatgtggacaccaacaccctggaaacccccttcgatgacctccagagcctcccaaacgacgtgatctcttccctgaagaacaggctgaaaaaggtctccacaaccactggggatggtgtggccagagcgttcctcaaggcccaggctgctttcttcggtagctaccgaaacgctctgaaaatcgagccggaggagccgatcactttctgtgaggaagccttcgtgtcccactaccgctccggagccatgaggcagttcctgcagaacgccacacagctgcagctcttcaagcagtttattgatggtcgattagatcttctcaattccggcgaaggtttcagtgatgtttttgaagaggaaatcaacatgggcgagtacgctggcagtgacaaactgtaccatcagtggctctccactgtccggaaaggaagtggagcaattctgaatactgtaaagaccaaagcaaatccggccatgaagactgtctacaagttcgcaaaagatcatgcaaaaatgggaataaaagaggtgaaaaaccgcttgaagcaaaaggacattgccgagaatggctgcgcccccaccccagaagagcagctgccaaagactgcaccgtccccactggtggaggccaaggaccccaagctccgagaagaccggcggccaatcacagtccactttggacaggtgcgcccacctcgtccacatgttgttaagagaccaaagagcaacatcgcagtggaaggccggaggacgtctgtgccgagccctgagcaaaacaccattgcaacaccagctacactccacatcctacagaaaagcattacccattttgcggccaagttcccgacgagaggctggacctcttcatcacattgacttacgccgttgcttttccagactgggcagaggggctgacttcgcagtgtgtgccaaagagccggtgtctgataatcccattttcctgcttatcacctgaactgtgtcagtatcacttttagttttgttggttggttggtttgttgtttgtttaatatgccctgttttctacttctgttggaaaatatttggggttgaaataaaccagtgggagcatggaaaaaaaaaaaaaaaaaaaaaaaaaaaaaaaaaa

SEQ ID NO: 28 - DNA, 508 bp, Homo sapiens
  GRB2
gtcatttgtcagtttatttaaagaataaaaaacaagacaacaatttagtagaagtaccactgggagggaggggaggggaaaaaaggatatacaggggcaggtgtattctctgtacagaggtgcagagaaaatttcacatagctttagagaatgccttgtggaaaaaaaaaaaaataggccccaatacttgttactgccctttatcaaaactgtgtgcatgacctgcacaaataaaatcacaaaacagtgttgccacattcttcaaggaaacaaagcaaaatttagtgggtttcttttccctctccttgttaaaagtcattttttaaaaacatcagaagtagatgaggttacagcgtacaagtgtggtcagaatgctactgtcgtatgcaaatgacgagtgcattaagtgtcaaacaatgaaacaattgtgcaaagaataaaaaaacaaattttagcctttaaataaatcaaataacatcagtttcttggactgaacaattttcacttc

SEQ ID NO: 29 - DNA, 539 bp, Homo sapiens
  MAP7
  modified_base (111)..(111): a, c, t or g
aaaactatgtcaaacattttttttggtgtttcatgctatgttgatttaaacaaattaaacaagtttgttgaacagctttcttttctaatataatgactagtgtgtacatgngacaacgtgaaaacagggaaaacccccaaattaatgttttcacaaattacaagccattactaaagaccatatgcctggattaaaaaaaatagtccaatagatgaagtctctcattcaacctagcagttcaaccaatttctcttttaataaaagctgcacattacagtggtataaatttatcttttaaacactccacataaaaacatgtgcaccctctccttctacatttaatcattagtagtctctaaaatggtaaaataaaactgaaattattttgagcaaatgaaagtgcaagtttgtacagctaggctcagcagcaaaagtgaagaataagaatgaaaggtgaaaagctgacagatgccacgcagagcaaggacttccatgaaggtccgtgtcctgtgtgccaaacacagtcaacattccatcat

SEQ ID NO: 30 - DNA, 579 bp, Homo sapiens
  COCH
tatcagattcttttattgagctatggaatttgcatatctgtacatttagtaggcatggttagaactcttaaggttttaatccacattatctcctctttcctgagtttctaagagccatgattatgaagcctcagcagtgtttttaacaaagtacactgtaaattgtaaccagaaggcagcggctttaaaggagtgcttatttgcctaaatggctgttgacatacttaatagttttgtatctgattctagtatgctaaagcatttcagtattatgagaatacaatttacacactggatccccttgtactttttctttcagttgtcaaaatgttaccattattgctgggattctaagaaatctctacaaatgcctctgatgacatcagaaacaattggttctaatcctgtgaactctcttgtgaagaaagcatgagactccttcggtttagaagccatatctttcaggtcatccagaggtgcccaagccacaccaacagagaagatagtgattcctgcatcatgtgcagcagctgcagggccttggacatcatcataggactgcccatctgtgaccattac

SEQ ID NO: 31 - DNA, 401 bp, Homo sapiens
  modified_base (300)..(300): a, c, t or g
  modified_base (309)..(309): a, c, t or g
  modified_base (317)..(317): a, c, t or g
  modified_base (357)..(357): a, c, t or g
  modified_base (375)..(375): a, c, t or g
ttttttttttgatgtttaacgtgtgttttattgttgttggcaccagaaaagctcatgttctatgttatgtcactgtacatactgtaaacaagactgcattaatattgttttcttatgatttgtttcaatgactctagattttaaaaaatacattcacaaactaccttatgtttaaacacaatgattcccttttatttcttaactgtacccaaaatcccacaataaaaaaatcatttaaagctgtgtgtttcaaacttatcacttaggaaataaaaacaaaacaaaacataaaaacaaagntcagtttgncaacatantttaaggaaggcttctgggtttaaaataccacggcggcantataaggggcgggtgggncaatcacattcggggaggtggaaatc

SEQ ID NO: 32 - DNA, 2745 bp, Homo sapiens
  P47; FLJ27168
ggcccagctgctgagaggagttgcctgagagtgacctttgcatctgcctgtccagccagcatggaaccaaagcggatcagagagggctaccttgtgaagaaggggagcgtgttcaatacgtggaaacccatgtgggttgtattgttagaagatggaattgaattctataagaagaaaagtgacaacagccccaaaggaatgatcccgctgaaagggagcactctgactagcccttgtcaagactttggcaaaaggatgtttgtgtttaagatcactacgaccaaacagcaggaccacttcttccaggcagccttcctggaggagagagatgcctgggttcgggatatcaataaggccattaaatgcattgaaggaggccagaaatttgccaggaaatctaccaggaggtccattcgactgccagaaaccattgacttaggtgccttatatttgtccatgaaagacactgaaaaaggaataaaagaactgaatctagagaaggacaagaagatttttaatcactgcttcacaggtaactgcgtcattgattggctggtatccaaccagtctgttaggaatcgccaggaaggcctcatgattgcttcatcgctgctcaatgaggggtatctgcagcctgctggagacatgtccaagagtgcagtggatggaactgctgaaaaccctttcctggacaaccctgatgccttctactactttccagacagtgggttcttctgtgaagagaattccagtgatgatgatgtgattctgaaagaagaattcagaggggtcattatcaagcagggatgtttactgaagcaggggcatagaaggaaaaactggaaagtgaggaagttcatcttgagagaagaccctgcctacctgcactactatgaccctgctggggcagaagatcccctgggagcaattcacttgagaggctgtgtggtgacttcagtggagagcaactcaaatggcaggaagagtgaggaagagaacctttttgagatcatcacagcagatgaagtgcactatttcttgcaagcagccacccccaaggagcgcacagagtggatcaaagccatccagatggcctcccgaactgggaagtaaagagactcctgcattcctcctcccctcctgagggaagcccatggacaagctcagtccaggacctgtccacttctgtgacaaatcaacgggaaacagcccaggggtgggaagttttcatttgcaggggggtctgaatgtaactcaccatgtggtgtgcaaggttcccctgcattgtattgctcactgcagcccctctgcccctatccatgacccccaagcagatataacaagctgtgcagcctcagtaggctgcttgccctctccagcctcagggcctcttctggaaaatgaagaaattcaactagtagattcctgaggtccccctagcttaaaaaaaaaaaaatctgccccatgattctaacactcgcagtagtgatagtgtatctagttgttctgctggtgtccttccttggctaagtcttggccttcagttatcttcaaatgtaccagaacctgagccaacgcctccctgtgaaactgttgctgatctgtagtacagtaccaggaagaaacctcttttgttctctttagacatcttctacttgctcttggccttgagatcgtgtaacaaaatgaaggagggctctcttctttcttcctcatcctactcaaaaacttcccgagagcagtggtggttttgagggttttgacttctattacttttggcagcctggaaagttgtgtcttctgggaaagagacccggggaggccaggagtagctgagggtcctttctgtgcccttaaaccgcccagaggagccctattccactctggttttaggctgatctgagagggtctccctttgttcctttctggagcatttctctaacgtttattacaattaggagggggaccccacatctgtgagattctgtttcatttgaggtttacagaaaaaaaaaagtggccagatgtgttccccccatgggtgagaggcctgggcaactgcctggtgaatgtgtcttgcggcagctgcagcaagtggaggggctgaactactggccagctcactggatgatgggttaatacaacaactgcactgtaaggactcagagccacacagaacttctgagaggggctgttagcattgcgcagcatcttcagttctccagtaaatgatattgcgttcgtgcctcagctttaagcacaagtagcagcagctcctgcttgagttctgagggcatcatggccctatgattaaccagagtgatctaacctagactaaaattgggaacttatttgcaatttttgaccctgaccactaactagtgattcttctccaaaattgagaaagacagcacccattgaaacagatatgtgtgtgaaagtatatttttcaattccagatttttaattttaaggctccaggaaagaaaggagagtagaacatttttcctcattttatcaaatcctctcttgccctccctcaattcccctgtaacattcctgaagctgttcccactcccagatggttttatcaatagcctagaggtaaagaactgtctttttctctgattctttaataaattatctttatagaatatgcacaagtttttctacactcagtgttaaagtatttattaatgggaagtcaacttaatgttttgaaataaatatatgactctgtttaat

SEQ ID NO: 33 - DNA, 11626 bp, Homo sapiens
  FBN; SGS; WMS; MASS; MFS1; OCTD
gggagccgcggcagagactgtgggtgccacaagcggacaggagccacagctgggacagctgcgagcggagccgagcagtggctgtagcggccacgactgggagcagccgccgccgcctcctcgggagtcggagccgccgcttctccactggcaggggccgcctgaagtgggagcagcgcctggagaaggcgggaggagcccggcccgggggacgggcggcgggatagcgggaccccggcggcgcggtgcgcttcagggcgcagcggcggccgcagaccgagccccgggcgcggcaagaggcggcgggagccggtggcggctcggcatcatgcgtcgagggcgtctgctggagatcgccctgggatttaccgtgcttttagcgtcctacacgagccatggggcggacgccaatttggaggctgggaacgtgaaggaaaccagagccagtcgggccaagagaagaggcggtggaggacacgacgcgcttaaaggacccaatgtctgtggatcacgttataatgcttactgttgccctggatggaaaaccttacctggcggaaatcagtgtattgtccccatttgccggcattcctgtggggatggattttgttcgaggccaaatatgtgcacttgcccatctggtcagatagctccttcctgtggctccagatccatacaacactgcaatattcgctgtatgaatggaggtagctgcagtgacgatcactgtctatgccagaaaggatacatagggactcactgtggacaacctgtttgtgaaagtggctgtctcaatggaggaaggtgtgtggccccaaatcgatgtgcatgcacttacggatttactggaccccagtgtgaaagagattacaggacaggcccatgttttactgtgatcagcaaccagatgtgccagggacaactcagcgggattgtctgcacaaaaacgctctgctgtgccacagtcggccgagcctggggccacccctgtgagatgtgtcctgcccagcctcacccctgccgccgtggcttcattccaaatatccgcacgggagcttgtcaagatgtggatgaatgccaggccatccccgggctctgtcagggaggaaattgcattaatactgttgggtcttttgagtgcaaatgccctgctggacacaaacttaatgaagtgtcacaaaaatgtgaagatattgatgaatgcagcaccattcctggaatctgtgaagggggtgaatgtacaaacacagtcagcagttacttttgcaaatgtccccctggtttttacacctctccagatggtaccagatgcatagatgttcgcccaggatactgttacacagctctgacaaacgggcgctgctctaaccagctgccacagtccataaccaaaatgcagtgctgctgtgatgccggccgatgctggtctccaggggtcactgtcgcccctgagatgtgtcccatcagagcaaccgaggatttcaacaagctgtgctctgttcctatggtaattcctgggagaccagaatatcctcccccaccccttggccccattcctccagttctccctgttcctcctggctttcctcctggacctcaaattccggtccctcgaccaccagtggaatatctgtatccatctcgggagccaccaagggtgctgccagtaaacgttactgattactgccagttggtccgctatctctgtcaaaatggacgctgcattccaactcctgggagttgccggtgtgagtgcaacaaagggttccagctggacctccgtggggagtgtattgatgttgatgaatgtgagaaaaacccctgtgctggtggtgagtgtattaacaaccagggttcgtacacctgtcagtgccgagctggatatcagagcacactcacgcggacagaatgccgagacattgatgagtgtttacagaatggccggatctgcaataatggacgctgcatcaacacagatggcagttttcattgcgtgtgtaatgcgggctttcatgttacacgagatgggaagaactgtgaagatatggatgaatgcagcataaggaacatgtgccttaatggaatgtgtatcaatgaagatggcagttttaaatgtatttgcaaacctggattccagctggcatcagatggacgttattgcaaagacattaacgagtgtgaaacccctgggatctgcatgaatgggcgttgcgtcaacactgatggctcctacagatgtgaatgcttccctggactggctgtgggtctggatggccgtgtgtgtgttgacacacacatgcggagcacatgctatggtggatacaagagaggccagtgtatcaaacctttgtttggtgctgtcactaaatctgaatgctgttgcgccagcactgagtatgcatttggggaaccttgccagccgtgtcctgcacagaattcagcggaatatcaggcactctgcagcagtgggccaggaatgacgtcagcaggcagtgatataaatgaatgtgcactagatcctgatatttgcccaaatggaatctgtgaaaaccttcgtgggacctataaatgtatatgcaattcaggatatgaagtggattcaactgggaaaaactgcgttgatattaatgaatgtgtactgaacagtctcctttgtgacaatggacaatgtagaaatactcctggaagttttgtctgtacctgccccaagggatttatctacaaacctgatctaaaaacatgtgaagacattgatgaatgcgaatcaagtccttgcattaatggagtctgcaagaacagcccaggctcttttatttgtgaatgttcttctgaaagtactttggatccaacaaaaaccatctgcatagaaaccatcaagggcacttgctggcagactgtcattgatgggcgatgtgagatcaacatcaatggagccaccttaaagtcccagtgctgctcctccctcggtgctgcgtggggaagcccgtgcaccctatgccaagttgatcccatatgtggtaaagggtactcaagaattaaaggaacacaatgtgaagatatagatgaatgtgaagtgttcccaggagtgtgtaaaaatggcctgtgtgttaacactagggggtcattcaagtgtcagtgtcccagtggaatgactttggatgccacaggaaggatctgtcttgatatccgcctggaaacctgcttcctgaggtacgaggacgaggagtgcaccctgcctattgctggccgccaccgcatggacgcctgctgctgctccgtcggggcagcctggggtactgaggaatgcgaggagtgtcccatgagaaatactcctgagtacgaggagctgtgtccgagaggacccggatttgccacaaaagaaattacaaatggaaagcctttcttcaaagatatcaatgagtgcaagatgatacccagcctctgcacccacggcaagtgcagaaacaccattggcagctttaagtgcaggtgtgacagcggctttgctcttgattctgaagaaaggaactgcacagacattgacgaatgccgcatatctcctgacctctgtggcagaggccagtgtgtgaacacccctggggactttgaatgcaagtgtgacgaaggctatgaaagtggattcatgatgatgaagaactgcatggatattgatgagtgtcagagagatcctctcctatgccgaggtggtgtttgccataacacagagggaagttaccgctgtgaatgcccgcctggccatcagctgtcccccaacatctccgcgtgtatcgacatcaatgaatgtgagctgagtgcacacctgtgccccaatggccgttgcgtgaacctcatagggaagtatcagtgtgcctgcaaccctggctaccattcaactcccgataggctattttgtgttgacattgatgaatgcagcataatgaatggtggttgtgaaaccttctgcacaaactctgaaggcagctatgaatgtagctgtcagccgggatttgcactaatgcctgaccagagatcatgcaccgacatcgatgagtgtgaagataatcccaatatctgtgatggtggtcagtgcacaaatatccctggagagtacaggtgcttgtgttatgatggattcatggcatctgaagacatgaagacttgtgtagatgtcaatgagtgtgacctgaatccaaatatctgcctaagtgggacctgtgaaaacacgaaaggctcatttatctgccactgtgatatgggctactccggcaaaaaaggaaaaactggctgtacagacatcaatgaatgtgaaattggagcacacaactgtggcaaacatgctgtatgtaccaatacagcaggaagcttcaaatgtagctgcagtcccgggtggattggagatggcattaagtgcactgatctggacgaatgttccaatggaacccatatgtgcagccagcatgcagactgcaagaataccatgggatcttaccgctgtctgtgcaaggaaggatacacaggtgatggcttcacttgtacagaccttgatgagtgctctgagaacctgaatctctgtggcaatggccagtgcctcaatgcaccaggaggataccgctgtgaatgcgacatgggcttcgtgcccagtgctgacgggaaagcctgtgaagatattgatgagtgctcccttccgaacatctgtgtctttggaacttgccacaacctccctggcctgttccgctgtgagtgtgagataggctacgaactggacagaagcggcgggaactgcacagatgtgaatgaatgcctggatccaaccacgtgcatcagtgggaactgtgtcaacactccaggcagctatatctgtgactgcccacctgattttgaactgaacccaactcgagttggctgtgttgatacccgctctggaaattgctatttggatattcgacctcgaggagacaatggagatacagcctgcagcaatgaaattggagttggtgtttccaaagcttcctgctgctgttctctgggtaaagcctggggtactccttgtgagatgtgtcctgctgtgaacacatccgagtacaaaattctttgtcctggaggggaaggtttccgaccaaatcctatcaccgttatattggaagatattgatgagtgccaggagctaccagggctgtgccaaggaggaaaatgtatcaacacctttgggagtttccagtgccgctgtccaaccggctactacctgaatgaagatacacgagtgtgtgatgatgtgaatgaatgtgagactcctggaatctgtggtccagggacatgttacaacaccgttggcaactacacctgtatctgtcctccagactacatgcaagtgaatgggggaaataattgcatggatatgagaagaagtttgtgctacagaaactactatgctgacaaccagacctgtgatggagaattgttattcaacatgaccaagaagatgtgctgctgttcctacaacattggccgggcgtggaacaagccctgtgaacagtgtcccatcccaagtacagatgagtttgctacactctgtggaagtcaaaggccaggctttgtcatcgacatttataccggtttacccgttgatattgatgagtgccgggagatcccaggggtctgtgaaaatggagtgtgtatcaacatggttggcagcttccgatgtgaatgtccagtgggattcttctataatgacaagttgttggtttgtgaagatattgacgagtgtcagaacggcccagtgtgccagcgcaacgccgaatgcatcaacactgcaggcagctaccgctgtgactgtaagcccggctaccgcttcacctccacaggacagtgcaatgatcgtaatgaatgtcaagaaatccccaatatatgcagtcatgggcagtgcattgacacagttggaagcttttattgcctttgccacactggttttaaaacaaatgatgaccaaaccatgtgcttggacataaatgaatgtgaaagagatgcctgtgggaatggaacttgccggaacacaattggttccttcaactgccgctgcaatcatggtttcatcctttctcacaacaatgactgtatagatgttgatgaatgtgcaagtggaaatgggaatctttgcagaaatggccaatgcattaatacagtggggtctttccagtgccagtgcaatgaaggctatgaggtggctccagatgggaggacctgtgtggatatcaatgaatgtcttctagaacccagaaaatgtgcaccaggtacctgtcaaaacttggatgggtcctacagatgcatttgcccacctggatacagtcttcaaaatgagaagtgtgaagatattgatgagtgtgtcgaagagccagaaatttgtgccctgggcacatgcagtaacactgaaggcagcttcaaatgtctgtgtccagaagggttttccttgtcctccagtggaagaaggtgccaagatttgcgaatgagctactgttatgcgaagtttgaaggaggaaagtgttcatcacccaaatccagaaatcactccaagcaggaatgctgctgtgccttgaagggagaaggctggggagacccctgcgagctctgccccacggaacctgatgaggccttccgccagatatgtccttatggaagtgggatcatcgtgggacctgatgattcagcagttgatatggacgaatgcaaagaacccgatgtctgtaaacatggacagtgcatcaatacagatggttcctatcgctgcgagtgtccctttggttatattctagcagggaatgaatgtgtagatactgatgaatgttctgttggcaatccttgtggaaatggaacctgcaagaatgtgattggaggttttgaatgcacctgcgaggagggatttgagcccggtccaatgatgacatgtgaagatataaatgaatgtgcccagaatcctctgctctgtgccttccgatgtgtgaacacttatgggtcatatgaatgcaaatgtcccgtgggatatgtgctcagagaagaccgtaggatgtgcaaagatgaggatgagtgtgaagagggaaaacatgactgtactgaaaaacaaatggaatgcaagaacctcattggcacatatatgtgcatctgtggacccgggtatcagcggagacctgatggagaaggctgtgtagatgagaatgaatgtcagacgaagccagggatctgtgagaatgggcgctgcctcaacacccgtgggagctacacctgtgagtgtaatgatgggtttaccgccagccccaaccaggacgagtgccttgacaatcgggaagggtactgcttcacagaggtgctacaaaacatgtgtcagatcggctccagcaacaggaaccccgtcaccaaatcggaatgctgctgtgacggagggagaggctggggtccccactgtgagatctgccctttccaggggactgtggctttcaagaaactctgtccccatggccgaggattcatgaccaatggagcagatatcgatgaatgcaaggttattcacgatgtttgccgaaatggggaatgtgtcaatgacagaggatcatatcattgcatttgtaaaactgggtacactccagatataactgggacttcctgtgtagatctgaacgagtgcaaccaggctcccaaaccctgcaattttatctgcaaaaacacagaagggagttaccagtgttcatgcccgaaaggctacattctgcaagaggatggaaggagctgcaaagatcttgatgagtgtgcaaccaagcaacacaactgccagttcctatgtgttaacaccattggcggcttcacatgcaaatgtcctcccggatttacccaacaccatacgtcctgcattgataacaatgaatgcacctctgacatcaatctgtgcgggtctaagggcatttgccagaacactcctggaagcttcacctgtgaatgccagcggggattctcacttgatcagaccggctccagctgtgaagacgtggacgagtgtgagggtaaccaccgctgccagcatggctgccagaacatcattgggggctacaggtgcagctgcccccagggctacctccagcactaccagtggaaccagtgtgttgatgaaaacgaatgcctcagcgctcacatctgcggaggagcctcctgtcacaacaccctggggagctacaagtgcatgtgtcccgccggcttccagtatgaacagttcagtggaggatgccaagacatcaatgaatgtggctctgcgcaggccccctgcagctatggctgttccaataccgagggcggttacctgtgtggctgtccacctggttacttccgcataggccaagggcactgtgtttctggaatgggcatgggccgaggaaacccagagccacctgtcagtggtgaaatggatgacaattcactctccccagaggcttgttacgagtgtaagatcaatggctaccccaaacggggcaggaaacggagaagcacaaacgaaactgatgcctccaatatcgaggatcagtctgagacagaagccaatgtgagtcttgcaagttgggatgttgagaagacagccatctttgctttcaatatttcccacgtcagtaacaaggttcgaatcctagaactccttccagctcttacaactctgacgaatcacaacagatacttgatcgaatctggaaatgaagatggcttctttaaaatcaaccaaaaggaagggatcagctacctccacttcacaaagaagaagccagtggctggaacctattcattacaaatcagtagtactccactttataaaaagaaagaacttaaccaactagaagacaaatatgacaaagactacctcagtggtgaactgggtgataatctgaagatgaaaatccaggttttgcttcattaattcaccatccagagaccaaataattaaaagaaaaacaaatatagataggtagaactatattttcccccaatcagaatcatcatatcataggtacaatctttcaccaagtaaatttgtataaataagcactattctttgtattaccaaagcaaggtacaggtgactaccctagttcaaaacaaccactttctcaggcttctcatgtgtgtagctaagctaccttgtcatatgtgttgattcttgaaaactgggacgtgtatttccattgggggttggccatttatgctgacatgccatccttccagcaaacgtacgggaatgtgctttcaattgatggactactctattttttgcaaatttgtaaactttgcttctccaaatacaagtactaggttgtccatttatggtacctatttggtgctagtaaattttcaaactagatttataaatgcactgtaatatgtacacaacttagaaaccaaattacaagtattcagttccaatacttcattaatttcaatcaaccaaagttagttcagtagcttatctcagttatgagtataatacattacatgtaaattaagtgtgtgtatactgtaatcgtgctattttttatcattgaaacatttataaactagaataataatgcccttaatgtgagggtttgtaatggtgcttattaagaccaaagacttgttaaatgtatacaccaagtggtaatgaaatttcggtgactggcccacacgtgcatagaggtctgggaggaccaggaaacagcctcagtggccagaggatcaccagtgcatccttcatcacagcatgtgcaatatgccaagattaccctcggtcattcctgtcaacaaggggtcaatgtcataaatgtcacaataaaacaatctcttcttttttttagtttaccccttggctttgtgttcttgcatggatttggggttggaggggccattccggaggctaaataaagtctcctggatttaaattatcctgggtctcttacttatggcttatgaaagtaccaaatgtataaccactagaagaaaatttaacatatgagtcgatcccttgttttatccattgaaagtagcagagtctggtgtcattaacctgacttgcttgtgagaaatttagattgtagagtcatttctgaaacatgacctaattcatcttgtgacttttaaatagtcttaaataccaagttcagtcattgtcttagagcacatgaatttcattataatagatttatcatgcccccctctcaaatatacacagttttggcaagccttaggtgttctgttccatttttttttcccctaaacatctttcgttagtcaatgctcatctaattacaaagggataatcccagactgtatccaattgctgtaacttttggtttcttaatgtcataatttttaaagtctgttttattttaagtgcaatattgagtatttagctgttaggctcaatccgtcgatatgaaataattttttaaatccctaagggcaggaaagcatttcgtggtagtgaaaataagaggaaataagatggcatgaaggtggtgggcggagaaactaggtaggacacaggaaagtgctctcaaaaatctttgaagagctcagctgaaaaaaatggagtagatttggctcatactattccggaaggcaaaaccagggtcagctgatgtcagccccagtttaatacacacggtcccaattatagagctactcactgaaagaatgggtttccttgcattgtggtgagctccctgtcacaagatagaagagtttcagtctaggcttaatggcaaccattggacaaagatgctttcttccacctaacaggccattaacatcttaaaggtatttttgtatctctaattttgtttataataggtgctcaacagaatgagctgaatggctgttacaaagggggtttgtaccttgggtaagagattaaaatataactcaaaatttccttctaacgctgcacctatggaaccatgtgatagaggtgtattaaaattgttatcgaagaatatatagcatatggtaaacaacagtttgcatatggaaaatgtctttgataatttaaccagaactgcattatattcaataacggattttctttataacaaacaacaggggaaaatggagttggcacacagtggatcactttgatatttttaatagtccaagtctggattttatttattcctgagccaacaattttgaacagcatattttccatgtttctgactgtaacaaaacattttcctcattgttccattgtaaatattcctcttgttggaactctttttaatcctgagatttaaacctgtacctttcaattgtctgtgacctttcaatttcactttcaatagttgaagaacttggctttgtaaatctctcagaagcttgaaaatatcttgtctctaccccctcagcccatttcatttgccaataattattttgtaagtagggttgaaatgaactcagctggccttgtgaaatgtttaaacttgcacaaacaactacatttttgttcaacaaatagcagtttactcagccaaaatcactttggatattgccattacaaatactgttaaacttcagaaatcatgtctgtaaattagatgagccaaaataaaggacaattgggttgatgctg

SEQ ID NO: 34 - DNA, 478 bp, Homo sapiens
  TOMM40
  modified_base (37)..(37): a, c, t or g
  modified_base (307)..(307): a, c, t or g
gcgaccgacacgtcctccatgtccgcgcccagccggnctcgcgccgcctgcagctccttggacagccgtgcccgcgtctcctccgccaccggggtcagttgttcctccagttccgatttgtaggccttcaactccttcatggtctcgtccatcagcgccctcagttcctgggtgacctgggagctcgagcagctcctcctgcacctgctcagacagtgtctgcacccagcgcaggtaatcccaaaagcgacccagtgccagttcccagcgctggccgctctgccactcggtctgctggcgcagtcgnggctccggctctgtctccaccgcttgctccaccttggcctggcatcctgccaggaatgtgaccagcaacgcagcccacagaaccttcatcttcctgcctgtgattggccagtcggctcctggggaaggacgtccttcaacctcgtgccgaattcttggcctcgaaggcaaa

SEQ ID NO: 35 - DNA, 1060 bp, Homo sapiens
  LAT1; pp36
gactctgcccttgaggggcctaggggtgcagccagcctgctccgagctcccctgcagatggaggaggccatcctggtcccctgcgtgctggggctcctgctgctgcccatcctggccatgttgatggcactgtgtgtgcactgccacagactgccaggctcctacgacagcacatcctcagatagtttgtatccaaggggcatccagttcaaacggcctcacacggttgccccctggccacctgcctacccacctgtcacctcctacccacccctgagccagccagacctgctccccatcccaagatccccgcagccccttgggggctcccaccggacgccatcttcccggcgggattctgatggtgccaacagtgtggcgagctacgagaacgaggaaccagcctgtgaggatgcagatgaggatgaggacgactatcacaacccaggctacctggtggtgcttcctgacagcaccccggccactagcactgctgccccatcagctcctgcactcagcacccctggcatccgagacagtgccttctccatggagtccattgatgattacgtgaacgttccggagagcggggagagcgcagaagcgtctctggatggcagccgggagtatgtgaatgtgtcccaggaactgcatcctggagcggctaagactgagcctgccgccctgagttcccaggaggcagaggaagtggaggaagagggggctccagattacgagaatctgcaggagctgaactgagggcctgtggaggccgagtctgtcctggaaccaggcttgcctgggacggctgagctgggcagctggaagtggctctggggtcctcacatggcgtcctgcccttgctccagcctgacaacagcctgagaaatccccccgtaacttattatcactttggggttcggcctgtgtcccccgaacgctctgcaccttctgacgcagcctgagaatgacctgccctggccccagccctactctgtgtaatagaataaaggcctgcgtgtgtctgtggaaaaaaaaaaaaaaaaaaaaaaaaaaaaaa

SEQ ID NO: 36 - DNA, 819 bp, Homo sapiens
  HLA-DRA1
actcccaaaagagcgcccaagaagaaaatggccataagtggagtccctgtgctaggatttttcatcatagctgtgctgatgagcgctcaggaatcatgggctatcaaagaagaacatgtgatcatccaggccgagttctatctgaatcctgaccaatcaggcgagtttatgtttgactttgatggtgatgagattttccatgtggatatggcaaagaaggagacggtctggcggcttgaagaatttggacgatttgccagctttgaggctcaaggtgcattggccaacatagctgtggacaaagccaacttggaaatcatgacaaagcgctccaactatactccgatcaccaatgtacctccagaggtaactgtgctcacgaacagccctgtggaactgagagagcccaacgtcctcatctgtttcatagacaagttcaccccaccagtggtcaatgtcacgtggcttcgaaatggaaaacctgtcaccacaggagtgtcagagacagtcttcctgcccagggaagaccaccttttccgcaagttccactatctccccttcctgccctcaactgaggacgtttacgactgcagggtggagcactggggcttggatgagcctcttctcaagcactgggagtttgatgctccaagccctctcccagagactacagagaacgtggtgtgtgccctgggcctgactgtgggtctggtgggcatcattattgggaccatcttcatcatcaagggattgcgcaaaagcaatgcagcagaacgcagggggcctctgtaaggcacatggaggtgatggtgtttctta

SEQ ID NO: 37 - DNA, 3969 bp, Homo sapiens
  Rab22B
ggcccagaaatagcagcggcgcgttcccctcggcgcagagcgacgggcagaggcgagagacgccgcggggccgggcggcggccccggaaggatgctgctgagccccggcactgcctggctgcgagcacatgatggcgatacgggagctcaaagtgtgccttctcggggacactggggttgggaaatcaagcatcgtgtgtcgatttgtccaggatcactttgaccacaacatcagccctactattggggcatcttttatgaccaaaactgtgccttgtggaaatgaacttcacaagttcctcatctgggacactgctggtcaggaacggtttcattcattggctcccatgtactatcgaggctcagctgcagctgttatcgtgtatgatattaccaagcaggattcattttataccttgaagaaatgggtcaaggagctgaaagaacatggtccagaaaacattgtaatggccatcgctggaaacaagtgcgacctctcagatattagggaggttcccctgaaggatgctaaggaatacgctgaatccataggtgccatcgtggttgagacaagtgcaaaaaatgctattaatatcgaagagctctttcaaggaatcagccgccagatcccacccttggacccccatgaaaatggaaacaatggaacaatcaaagttgagaagccaaccatgcaagccagccgccggtgctgttgacccaagggccgtggtccacggtacttgaagaagccagagcccacatcctgtgcactgctgaaggaccctacgctcggtggcctggcacctcactttgagaagagtgagcacactggctttgcatcctggaagacctgcagggggcggggcaggaaatgtacctgaaaaggattttagaaaaccctgggaaaacccaccacaccaccacaaaatggcctttagtgtatgaaatgcacatggaggggatgtagttgcatttttgctaaaaaaaaaaaaaaacctttaaaaattgttggatgtgtacaaaagtcttactgccttattatgtgtatgggattctaaagtggcattccacttggatttcctgtgctacctatcccaaattcccagtaactacttcagtgtcattgcctttgttacctaaccaaccttcactgaaaggcaaatttagttcaggaggttagtttttagctagctttggaagtaagcctttatttattactttttggaggaaatcagagaagtgtcaatggaccgtcactcagactgagacttgagttattacagaagccaggaaaagtgtattagaaactgttgtctacaccacttttaattggtgaacaatttttctaagttatggtcatatatacccaaacaaaccaaatcaaactaaattactgcatataattttgggattgggtggcctagtttgaaagagtgatttaagtaatcactatgtaagtggtgagagatgcaggacatacacattattcaagagaccacctgacatgcatctcctccgcaggaatacattcgtcctctcttagagaagtttaacgcacatagtattattttactaagagaatatctcttggtgtcatatctaggggaagagaattaactagaattaaatttaatgtttgaatctaaatcattgggcaaacttctaataataacaattaataataggttacaggaaagccagccagaggaagtgtcagcactttaaaattctagaccccaaaaaactacaaaatcagaaaaagtatttttatgtttctagcttgaggagaagggctttagggctaaccagaggtctgaccctagaatgccaaggaactgagaatgggctccgatgaaaaccttccttttcagattccctgtctgctcaattaaagatgtttgaatccaaaggaagtcaaggaagaaaaagcatggaaaggaagagaactgattcctactgaaaattcaaattctattaccattctaactttcataaaaagttgggatcaagaagcagctgatttcctgccagggcttatattagggggtgattcttaaaggacattaggattggtgctcagaaatggttaatcatgctgtgtgctagccagggccagctggtaccttctttgccatgagcattcaagggacagctaacctttattgacaatctatattgcaaaagtcaggaaagaggttgtgagctgattggattaaagacctggcacttcagtaactcagcacgcttccacttcactcaacttaagagagttcattgacagtgttaggatgtgaaggctgggaaacacttattttgcttcaagagttccacttggctctcccaaataggtacctcaaaaactgttagcaagcggcatttggatgtcttgacaggggctttgcagggatttttagggttttttccacattgtccacattaatggttggcatgattgtgcttgcaggccaagaaatgatcataccccttgccaaaggtaaaaaaaaaaaaaaaaaaatgagttgaaaattgaagtgacctctttccagctgacttgcaggcttattttgtaacctttcctcatccagttttccctgagaacctgggtttatctctagatagctgttcaggttttttagctgaggggtaagtatcctagctgagagttttgcatctttgggctgggtttgcagtggttgtgttttgcataaaatgtctagtctttgccacagatagtgagctacccactaatgagcccatggttttatttcagaagcacatgagggtgtgaaaccactctgttacctttctgtattgtcttagctattcaagccagtcagaggataatatatatattctcatcagcactcagagtagtcagtgaagagagtaggatcacacttggggcacaccaggattcacataaacattgtatcttctctgtggatgctcaggccttgtctacaatgaggctttacaaccttccttgtttggctcgggattacttcctggctgtctaataattgaaccataaccatgtaatattatgtaaaggcctggaaattactgttgctaaaaaaagtcatgtagtttcatgtagtgtagcatccttggcatcgttttccaaaatttgttccttctcccttttttttttctttcgtgtgtggcatgagtgtgtatctgtgtaaatatgattgtatatgtgttactccgatatgtaatccatttcactggctgagtttggcccctagccatgtgttaatataaagtagggcatgggcttcccaatggaaatctctgagaatgacagtggagttgtgcaagcattttacattgccacataattgacttgccattttatggttaaaaacgggcacattaggcagttgaatatgacgttaccttgcagactaaaaggttgaaggcccgaaactaacttttagctaacaataagggctgtgccccaatggaaactgagttcattttctgagaaaggtttggatgactgaaatatttcctctacagtcaaggactttggcatgcggtggctgaaactgagcttttttgtgtgggctccagttctcactgttctgcaatgctcatggcaagttgaatggtgagctagcttataaattaaagagctctgaactgtattcagaccgactgggtatctagcttactgttttaacatcattgttgaaaccagaccctgtagtccagtggtgctgccctgttgtgcaaactgctcctttttctcgtgtttttgtaaagagcttccatctgggctggacccagttcttgcacatacaagacaccgctgcagtcagctaggacctttccgccatgtattctattctgtagtaaagcatttccatcaacaatgcctaattgtatctgttatttttggtttaacacacactgattcatactaataaatattttcagttttaaaaaaaaaaaaaaaaaaaaaaa

SEQ ID NO: 38 - DNA, 1254 bp, Homo sapiens
  DIF2; IEX1; PRG1; DIF-2; GLY96; IEX-1; IEX-1L
ctcacttggccttacactccgctcggctcaccatgtgtcactctcgcagctgccacccgaccatgaccatcctgcaggccccgaccccggccccctccaccatcccgggaccccggcggggctccggtcctgagatcttcaccttcgaccctctcccggagcccgcagcggcccctgccgggcgccccagcgcctctcgcgggcaccgaaagcgcagccgcagggttctctaccctcgagtggtccggcgccagctgccagtcgaggaaccgaacccagccaaaaggcttctctttctgctgctcaccatcgtcttctgccagatcctgatggctgaagagggtgtgccggcgcccctgcctccagaggacgcccctaacgccgcatccctggcgcccacccctgtgtccgccgtcctcgagccctttaatctgacttcggagccctcggactacgctctggacctcagcactttcctccagcaacacccggccgccttctaactgtgactccccgcactccccaaaaagaatccgaaaaaccacaaagaaacaccaggcgtacctggtgcgcgagagcgtatccccaactgggacttccgaggcaacttgaactcagaacactacagcggagacgccacccggtgcttgaggcgggaccgaggcgcacagagaccgaggcgcatagagaccgaggcacagcccagctggggctaggcccggtgggaaggagagcgtcgttaatttatttcttattgctcctaattaatatttatatgtatttatgtacgtcctcctaggtgatggagatgtgtacgtaatatttattttaacttatgcaagggtgtgagatgttccccctgctgtaaatgcaggtctcttggtatttattgagctttgtgggactggtggaagcaggacacctggaactgcggcaaagtaggagaagaaatggggaggactcgggtgggggaggacgtcccggctgggatgaagtctggtggtgggtcgtaagtttaggaggtgactgcatcctccagcatctcaactccgtctgtctactgtgtgagacttcggcggaccattaggaatgagatccgtgagatccttccatcttcttgaagtcgcctttagggtggctgcgaggtagagggttgggggttggtgggctgtcacggagcgactgtcgagatcgcctagtatgttctgtgaacacaaataaaattgatttactgtctgcaaaaaaaaaaaaaaa

SEQ ID NO: 39 - DNA, 2955 bp, Homo sapiens
  PKCB; PRKCB; PRKCB2; MGC41878; PKC-beta
cgcagcccgcggtcccgccgccccggggccggcacctctcgggctccggctccccgcgcgcaagatggctgacccggctgcggggccgccgccgagcgagggcgaggagagcaccgtgcgcttcgcccgcaaaggcgccctcaggcagaagaacgtgcatgaggtcaagaaccacaaattcaccgcccgcttcttcaagcagcccaccttctgcagccactgcaccgacttcatctggggcttcgggaagcagggattccagtgccaagtttgctgctttgtggtgcacaagcggtgccatgaatttgtcacattctcctgccctggcgctgacaagggtccagcctccgatgacccccgcagcaaacacaagtttaagatccacacgtactccagccccacgttttgtgaccactgtgggtcactgctgtatggactcatccaccaggggatgaaatgtgacacctgcatgatgaacgtgcacaagcgctgcgtgatgaatgttcccagcctgtgtggcacggaccacacggagcgccgcggccgcatctacatccaggcccacatcgacagggacgtcctcattgtcctcgtaagagatgctaaaaaccttgtacctatggaccccaatggcctgtcagatccctacgtaaaactgaaactgattcccgatcccaaaagtgagagcaaacagaagaccaaaaccatcaaatgctccctcaaccctgagtggaatgagacatttagatttcagctgaaagaatcggacaaagacagaagactgtcagtagagatttgggattgggatttgaccagcaggaatgacttcatgggatctttgtcctttgggatttctgaacttcagaaagccagtgttgatggctggtttaagttactgagccaggaggaaggcgagtacttcaatgtgcctgtgccaccagaaggaagtgaggccaatgaagaactgcggcagaaatttgagagggccaagatcagtcagggaaccaaggtcccggaagaaaagacgaccaacactgtctccaaatttgacaacaatggcaacagagaccggatgaaactgaccgattttaacttcctaatggtgctggggaaaggcagctttggcaaggtcatgctttcagaacgaaaaggcacagatgagctctatgctgtgaagatcctgaagaaggacgttgtgatccaagatgatgacgtggagtgcactatggtggagaagcgggtgttggccctgcccgggaagccgcccttcctgacccagctccactcctgcttccagaccatggaccgcctgtactttgtgatggagtacgtgaatgggggcgacctcatgtatcacatccagcaagtcggccggttcaaggagccccatgctgtattttacgctgcagaaattgccatcggtctgttcttcttacagagtaagggcatcatttaccgtgacctaaaacttgacaacgtgatgctcgattctgagggacacatcaagattgccgattttggcatgtgtaaggaaaacatctgggatggggtgacaaccaagacattctgtggcactccagactacatcgcccccgagataattgcttatcagccctatgggaagtccgtggattggtgggcatttggagtcctgctgtatgaaatgttggctgggcaggcaccctttgaaggggaggatgaggatgaactcttccaatccatcatggaacacaacgtagcctatcccaagtctatgtccaaggaagctgtggccatctgcaaagggctgatgaccaaacacccaggcaaacgtctgggttgtggacctgaaggtgaacgtgatatcaaagagcatgcatttttccggtatattgattgggagaaacttgaacgcaaagagattcagcccccttataagccaaaagcttgtgggcgaaatgctgaaaacttcgaccgatttttcacccgccatccaccagtcctaacacctcctgaccaggaagtcatcaggaatattgaccaatcagaattcgaaggattttcctttgttaactctgaatttttaaaacccgaagtcaagagctaagtagatgtgtagatctccgtccttcatttctgtcattcaagctcaacggctattgtggtgacatttttatgttttcattgccaagttgcatccatgtttgattttctgatgagactagagtgacagtgtttcagaacccaaatgtcctcaggtagttttggagcatctctatgagatgggattatgcagatggcctatggaaaatgcagctgcataattaacacattatcaaagtcctcttacaatttattttccgcagcatgtcagctaagtagacccaatggggagagaaaatgcctgctttctttcccttttttctgcactgccatattcacccccaaccatccaatctgtggataattggatgttagcggtactcttccacttccgggcctggagcttggcttgtatccaagtgtatggttgctttgcctaagaggaatccctctatttcacctgttctggaggcaccagaccttgaaaagaacatgctcaaaataaaatgttatctgttatttttgtaaactcaaagttaagatgatcaaagttctaaaattccaagaatgtgcttttagacggtctcaatctaaaagcacttcaaggggtcaaagggcaaccagcttgggtgctacctcagtgttgtagtttctgatactttatgtctttgctcaccctcatccccaaactacttgaaaagggcatttggcaccactctctgaaacaacacagtcactctagcaaggcccccaaagggccctggttttacattacatttcaaactttatttgctttggggttttgtttctgttgttgttcaaatgcaaaaaaaaattatttgctttggggttttatttctgttgttcaaatgc

SEQ ID NO: 40 - DNA, 3087 bp, Homo sapiens
  PIR121
aagagaacaagtccaagtggacgtgcacccagagcagcatcagcccccagtacaatatctgcgagcagatggttcagatccgggatgaccacatccgcttcatctccgagctcgctcgctacagcaacagtgaggtggtgacgggctcagggctggacagccagaagtcagacgaggagtatcgcgagctcttcgacctagccctgcggggtctgcagcttctatccaagtggagcgcccacgtcatggaggtgtactcttggaagctggttcatcccacagacaagttctgcaacaaggactgtcctggcaccgcggaggaatatgagagagccacacgctacaattacaccagtgaggaaaaatttgccttcgttgaggtgatcgccatgatcaaaggcctgcaggtgctcatgggcaggatggagagcgtcttcaaccaggccatcaggaacaccatctacgcggcattgcaggacttcgcccaggtgacgctgcgtgagcccctgcggcaggcggtacggaagaagaagaatgtcctcatcagcgtcctacaggcaattcgaaagaccatctgtgactgggagggagggcgagagccccctaatgacccatgcttgagaggggagaaggaccccaaaggtggatttgatatcaaggtgccccggcgtgctgtggggccatccagcacacaggcctgccagtggtccccgagggctttgtttcaccccactggtggcacacagggccgaagaggctgccgatccctgctgtacatggtgcggaccatgcttgaatcactcattgcagacaaaagcggctccaagaagaccctgaggagcagcctggatggacccattgtcctcgccatagaggactttcacaaacagtccttcttcttcacacatctgctcaacatcagtgaagccctgcagcagtgttgtgacctctcccagctctggttccgagaattcttcctggagttaaccatgggccgacgaatccagttccccatcgagatgtccatgccctggattctaacggaccatatcctggaaaccaaagaaccttccatgatggagtatgtcctctaccctctggatctgtacaacgacagcgcctactatgctctgaccaagtttaaaaagcagttcctgtacgatgagatagaagctgaggtgaacctgtgttttgatcagtttgtctacaagctggcagaccagatctttgcttactacaaagccatggctggcagtgtcctgttggataaacgttttcgagctgagtgtaagaattatggcgtcatcattccgtatccaccgtccaatcgctatgaaacactgctgaagcagagacacgtccagctgttgggtagatcaattgacttgaacagactcattacccagcgcatctctgccgccatgtataaatccttggaccaagctatcagccgctttgagagtgaggacctgacctccattgtggagctggagtggctgctggagattaaccggctcacgcatcggctgctctgtaagcatatgacgctggacagcttcgatgccatgttccgagaggccaatcacaatgtgtccgccccctatggccgtatcaccctgcatgtcttctgggaactgaactttgactttctccccaactactgctacaatgggtccactaaccgttttgtgcggactgccattcctttcacccaagaaccacaacgagacaaacctgccaacgtccagccttattacctctatggatccaagcctctcaacattgcctacagccacatctacagctcctacaggaatttcgtggggccacctcatttcaagactatctgcagactcctgggttatcagggcatcgctgtggtcatggaggaactgctaaagattgtgaagagcttgctccaaggaaccattctccagtatgtgaaaacactgatagaggtgatgcccaagatatgccgcttgccccgacatgagtatggctccccagggatcctggagttcttccaccaccagctgaaggacatcattgagtacgcagagctcaaaacagacgtgttccagagcctgagggaagtgggcaatgccatcctcttctgcctcctcatagagcaagctctgtctcaggaggaggtctgcgatttgctccatgccgcacccttccaaaacatcttgcctagagtctacatcaaagagggggagcgcctggaggtccggatgaaacgtctggaagccaagtatgccccgctccacctggtccctctgatcgagcggctggggacccctcagcaaatcgccattgctcgcgagggtgacctcctgaccaaggagcggctgtgctgtggcctgtccatgttcgaggtcatcctgacccgcattcggagctacctgcaggaccccatctggcggggcccaccgcccaccaatggcgtcatgcacgtcgatgagtgtgtggagttccaccggctgtggagcgccatgcagttcgtgtactgcatccctgtgggaaccaacgagttcacagctgagcagtgtttcggcgatggcttgaactgggctggttgctccatcattgtcctgctgggccagcagcgtcgctttgacctgttcgacttctgttaccacctgctaaaagtgcagaggcaggacgggaaggatgaaatcattaagaatgtgcccctgaagaagatggccgaccggatcaggaagtatcagatcttgaacaatgaggtttttgccatcctgaacaaatacatgaagtccgtggagacagacagttccactgtggagcatgtgcgctgcttccagccacccatccaccagtccttggccaccacttgctaagcagaagatcctgcagacccttatttggaggaggaagagaagcaggagagagaaagccacagccagcctgccataggatccaactggacaacgtgtgggatggacctggaaacaagcacctccccaaacacatcaccactccctagggcggggcctgtgcatgctctcccatgacatctccatgctggtttctccatagcataaatgaaaaaaaaaaaaaaaaaaa

SEQ ID NO: 41 - DNA, 1550 bp, Homo sapiens
  F52; MLP; MRP; MLP1; MACMARCKS
gcggagcggagcggcggcgggcgcagctagcgggtcggccgcggagcggaggtgcagctcggcttcccccggcacccctccccctcgggcgccagccccacccctccgccggccgggccgaccccgccgtactatcccctgcggcgcgagcccggggcggctccaagcgccccccagcagacccccatcatgggcagccagagctccaaggctccccggggcgacgtgaccgccgaggaggcagcaggcgcttcccccgcgaaggccaacggccaggagaatggccacgtgaaaagcaatggagacttatcccccaagggtgaaggggagtcgccccctgtgaacggaacagatgaggcagccggggccactggcgatgccatcgagccagcaccccctagccagggtgctgaggccaagggggaggtcccccccaaggagacccccaagaagaagaagaaattctctttcaagaagcctttcaaattgagcggcctgtccttcaagagaaatcggaaggagggtgggggtgattcttctgcctcctcacccacagaggaagagcaggagcagggggagatcggtgcctgcagcgacgagggcactgctcaggaagggaaggccgcagccacccctgagagccaggaaccccaggccaagggggcagaggctagtgcagcctcagaagaagaggcagggccccaggctacagagccatccactccctcggggccggagagtggccctacaccagccagcgctgagcagaatgagtagctaggtaggggcaggtgggtgatctctaagctgcaaaaactgtgctgtccttgtgaggtcactgcctggacctggtgccctggctgccttcctgtgcccagaaaggaaggggctattgcctcctcccagccacgttccctttcctcctctccctcctgtggattctcccatcagccatctggttctcctcttaaggccagttgaagatggtcccttacagcttcccaagttaggttagtgatgtgaaatgctcctgtccctggccctacctccttccctgtccccacccctgcataaggcagttgttggttttcttccccaattcttttccaagtaggttttgtttaccctactccccaaatccctgagccagaagtggggtgcttatactcccaaaccttgagtgtccagccttcccctgttgtttttagtctcttgtgctgtgcctagtggcacctgggctggggaggacactgccccgtctaggtttttataaatgtcttactcaagttcaaacctccagcctgtgaatcaactgtgtctcttttttgacttggtaagcaagtattaggctttggggtggggggaggtctgtaatgtgaaacaacttcttgtcttttttttctcccactgttgtaaataacttttaatggccaaaccccagatttgtacttttttttttttctaactgctaaaaccattctcttccacctggttttactgtaacatttggaaaaggaataaatgtcgtccctttaaaaaaaaaaaaaaaa

SEQ ID NO: 42 - DNA, 873 bp, Homo sapiens
  FLAP
acttccccttcctgtacagggcaggttgtgcagctggaggcagagcagtcctctctggggagcctgaagcaaacatggatcaagaaactgtaggcaatgttgtcctgttggccatcgtcaccctcatcagcgtggtccagaatggattctttgcccataaagtggagcacgaaagcaggacccagaatgggaggagcttccagaggaccggaacacttgcctttgagcgggtctacactgccaaccagaactgtgtagatgcgtaccccactttcctcgctgtgctctggtctgcggggctactttgcagccaagttcctgctgcgtttgctggactgatgtacttgtttgtgaggcaaaagtactttgtcggttacctaggagagagaacgcagagcacccctggctacatatttgggaaacgcatcatactcttcctgttcctcatgtccgttgctggcatattcaactattacctcatcttctttttcggaagtgactttgaaaactacataaagacgatctccaccaccatctcccctctacttctcattccctaactctctgctgaatatggggttggtgttctcatctaatcaatacctacaagtcatcataattcagctcttgagagcattctgctcttctttagatggctgtaaatctattggccatctgggcttcacagcttgagttaaccttgcttttccgggaacaaaatgatgtcatgtcagctccgccccttgaacatgaccgtggccccaaatttgctattcccatgcattttgtttgtttcttcacttatcctgttctctgaagatgttttgtgaccaggtttgtgttttcttaaaataaaatgcagagacatgtttt

SEQ ID NO: 43 - DNA, 1646 bp, Homo sapiens
  HTM4; CD20L
tagtgatcttttctgagtgtctcctacttgcgacaaggtggacttgggaggaaagccgtctgccaaagcctgaagcctccaagccataaacaaccccaatggcctcccacgaagttgataatgcagagctggggtcagcctctgcccatggtaccccaggcagtgagacgggaccagaagagctgaatacttctgtctaccaccccataaatggatcaccagattatcagaaagcaaaattacaagttcttggggccatccagatcctgaatgcagcaatgattctggctttgggtgtctttctgggttccttgcaatacccataccacttccaaaagcacttctttttcttcaccttctacacaggctacccgatttggggtgctgtgtttttctgtagttcaggaaccttgtctgttgtagcagggataaaacccacaagaacatggatacagaacagttttggaatgaacattgccagtgctacaattgcactagtggggactgcttttctctcactaaatatagcagttaatatccagtcattaaggagttgtcactcttcatcagagtcaccggacctatgcaattacatgggctccatatcaaatggcatggtgtctctactgctgattctcaccttgctggaattatgcgtaactatctctaccatagccatgtggtgcaatgcaaactgctgtaattcaagagaggaaatttcctcacctcccaattctgtgtaatcaagaatacctccttatgaaaataattctgagagcatgaatatttgaccttaaatctccagtgactcagagcttcacccacaaactcaggagaacataagcctgctcgtaaagctcaatccttctatcatggcaccaatcacaagaaccttggacgtttgactgactctatcctttctctcctaactataaatcctatttgtgtgtcgtgggtatggaaggacagatatatttctttaggcattcttggatatctgtaacttctatgatcattactccaaagttgtttccagaaattggttctatttcttcttatccacctactccattgctttatgaggtttaaggaaggaaggcggtataatccctattcaatatattttttctaaaatccaacttctgaccgcccagtaggaagaaaaatgagacattttttccattacagagaaatgcttcttgactttaacatcagcattataaaaagtgtcaaataaaaaattaccatcattatcattaaaataaattttcactgtatttgagatgggagggttaaggctcagggattttatttcagtgaactgctggaactcacacatgccctgatatgtaaatgatgatttatgttggcgagtctgagagcaagcccaaatgtgttcttcaaaggacaatgggaaactgtaaagtagagaactaaagaataaggcctttagaatctgacacatctgggttcaaattctgaaactgtcacttattacctgtatgaacatgggcaaattatctaatctctctgatctatttttcctcatctgtaaaataggtgtaataataacaactactttgtcggttgctctgagggttaaatgaaaataaaaagaaaatgtgaaacagcaccacaggtacttg

SEQ ID NO: 44 - DNA, 2410 bp, Homo sapiens
  HDC
agggagtgcgcaggactggcaagagggaagccgggctgctccacgcctttcacgccttccacctcctgcgtgtccatctgtgagaaggagccagagcccaagggagatgatggagcctgaggagtacagagagagagggagagagatggtggattacatctgccagtacctgagcactgtgcgggagagacgtgtgacgccagacgtgcagcctggctacctgcgagcccagctgcctgagagtgctcctgaggaccccgacagctgggacagcatctttggggacattgaacgaatcatcatgcctggggtggtacattggcagagcccccatatgcacgcctactacccagccctcacctcttggccctccctgctaggagacatgctggctgatgccatcaactgcttgggattcacctgggcatccagccctgcgtgtacagagctggagatgaacgtcatggactggttggcaaaaatgctgggacttccagagcacttcttgcaccaccaccccagcagccagggcggaggcgtcctgcagagcacggtcagtgaatccactttgattgccctgctggcagcaaggaagaacaaaatcctggaaatgaaaacgtctgagcccgatgctgatgagtcctgcctaaatgcccgactcgtggcctatgcctctgaccaggctcactcctctgtggaaaaggctggtttgatttcccttgtgaagatgaaatttctgcctgtggatgacaacttctcactccgaggggaagctcttcagaaggccatcgaggaagacaagcagcggggcttggtgcccgtctttgtctgtgcaacactagggaccactggggtctgtgcatttgactgcctgtcagagctgggccccatctgtgcccgtgaggggctgtggctccacatcgatgctgcttatgcaggcactgccttcctgtgccccgagttccgggggtttctgaaggggattgagtatgccgactccttcacctttaatccttccaagtggatgatggtgcattttgactgtactgggttctgggtcaaggacaagtacaagctgcagcagaccttcagtgtgaatcccatctacctcaggcatgccaactcaggcgtggccaccgacttcatgcactggcagatccccctgagccgacggtttcgctctgttaaactctggttcgtgattcggtccttcggggtgaagaatcttcaagcacatgtcagacatggtactgaaatggctaaatattttgaatctctggtcagaaacgacccttcctttgaaattcctgccaagaggcaccttggcctggtggtttttcgtctaaagggtcctaattgtctcacagaaaatgtgttaaaggaaatagctaaagctggccgtctcttcctcatcccggccactatccaggacaagttaatcatccgtttcactgtgacatcccagtttaccactagggatgacatcctgagagactggaatctcattcgagatgctgccactctcatcctgagtcagcactgtacttcccaacccagccctcgggttgggaacctcatctcccaaatcaggggtgccagagcctgggcctgtggaacgtcccttcagtctgtcagtggggcaggagatgatccagtccaggccaggaagatcatcaagcagcctcagcgtgtgggagccggtcccatgaaaagggaaaatggcctccatcttgaaaccctgctggacccagttgatgactgcttttcagaagaggccccagatgccaccaagcacaagctgtcctccttcctgttcagttacttgtctgtgcagactaagaagaagacggtgcgctccctcagttgcaacagtgtgccagtgagtgctcagaagccactgcccacagaggcctctgtgaagaatgggggctcctccagggtcagaatcttttccaggtttccagaagacatgatgatgctgaagaaaagtgccttcaaaaaactcatcaaattctacagcgtccccagctttcctgaatgcagctctcaatgtggactccagctgccctgttgccctctgcaggccatggtttagacacagggccttcagccagagtctgaggatatacttcagggactctgtgaacccctcacaattgtatgccaactttgtgtgcttatgtgtacatgcatttttcttggggcgagttcataattttaatcaaattctcataggggttcatgacccacaataggatacaaacgaagagtttaagccagcatgatccagatgggttcagcagtctggtcagtgagaaagggccgagggtagacaggcagcttctgtggttcagcttgtgacatgatatataacacagaaataaattatgcttgtccctgaaacaaaaaa

SEQ ID NO: 45 - DNA, 2116 bp, Homo sapiens
  ALDC; ALDH1; PUMB1; ALDH11; RALDH1; ALDH-E1; MGC2318
atcagaaccaaattgctgagccagtcacctgtgttccaggagccgaatcagaaatgtcatcctcaggcacgccagacttacctgtcctactcaccgatttgaagattcaatatactaagatcttcataaacaatgaatggcatgattcagtgagtggcaagaaatttcctgtctttaatcctgcaactgaggaggagctctgccaggtagaagaaggagataaggaggatgttgacaaggcagtgaaggccgcaagacaggcttttcagattggatccccgtggcgtactatggatgcttccgagagggggcgactattatacaagttggctgatttaatcgaaagagatcgtctgctgctggcgacaatggagtcaatgaatggtggaaaactctattccaatgcatatctgaatgatttagcaggctgcatcaaaacattgcgctactgtgcaggttgggctgacaagatccagggccgtacaataccaattgatggaaatttttttacatatacaagacatgaacctattggtgtatgtggccaaatcattccttggaatttcccgttggttatgctcatttggaagatagggcctgcactgagctgtggaaacacagtggttgtcaaaccagcagagcaaactcctctcactgctctccacgtggcatctttaataaaagaggcagggtttcctcctggagtagtgaatattgttcctggttatgggcctacagcaggggcagccatttcttctcacatggatatagacaaagtagccttcacaggatcaacagaggttggcaagttgatcaaagaagctgccgggaaaagcaatctgaagagggtgaccctggagcttggaggaaagagcccttgcattgtgttagctgatgccgacttggacaatgctgttgaatttgcacaccatggggtattctaccaccagggccagtgttgtatagccgcatccaggatttttgtggaagaatcaatttatgatgagtttgttcgaaggagtgttgagcgggctaagaagtatatccttggaaatcctctgaccccaggagtcactcaaggccctcagattgacaaggaacaatatgataaaatacttgacctcattgagagtgggaagaaagaaggggccaaactggaatgtggaggaggcccgtgggggaataaaggctactttgtccagcccacagtgttctctaatgttacagatgagatgcgcattgccaaagaggagatttttggaccagtgcagcaaatcatgaagtttaaatctttagatgacgtgatcaaaagagcaaacaatactttctatggcttatcagcaggagtgtttaccaaagacattgataaagccataacaatctcctctgctctgcaggcaggaacagtgtgggtgaattgctatggcgtggtaagtgcccagtgcccctttggtggattcaagatgtctggaaatggaagagaactgggagagtacggtttccatgaatatacagaggtcaaaacagtcacagtgaaaatctctcagaagaactcataaagaaaatacaagagtggagagaagctcttcaatagctaagcatctccttacagtcactaatatagtagattttaaagacaaaatttttcttttcttgatttttttaaacataagctaaatcatattagtattaatactacccatagaaaacttgacatgtagcttcttctgaaagaattatttgccttctgaaatgtgacccccaagtcctatcctaaataaaaaaagacaaattcggatgtatgatctctctagctttgtcatagttatgtgattttcctttgtagctacttttgcaggataataattttatagaaaaggaacagttgcatttagcttctttcccttagtgactcttgaagtacttaacatacacgttaactgcagagtaaattgctctgttcccagtagttataaagtccttggactgttttgaaaagtttcctaggatgtcatgtctgcttgtcaaaagaaataatccctgtaatatttagctgtaaactgaatataaagcttaataaaaacaaccttgcatgaaaaaaaaaaaaaaaaaaaaa

SEQ ID NO: 46 - DNA, 680 bp, Homo sapiens
  TERF2IP
  modified_base (533)..(533): a, c, t or g
  modified_base (676)..(676): a, c, t or g
ttatgttttcaggttttttaatgactgacaaaatattcctaaatcaaccttttataaataaaaaaaaataaatatgtttcatctgaattcacaaagacaaaccctgctgcaaatactaagtacaaattattctgtactggacatggcaaatctgatttagtacaaattcagtttttaaaaggaccctctttccaaatagtgttcttatgtaacatttaatttttatgcctattatttcaatgacacacctagtttttgcttttctaagcactgttccctacatttttaaagcatattttatttcagagtgcaacagaaactagcttgtggcctattaagctactaggaagagcatcgtttatgccactgtatgccttcttaggccatttatcatttctctacacttgattgctcactggctattcaaaattggaatgtgatacagcagttctgtctgaacgtgtaccaacctgaaactcacatggctaaacaattatggctaaactatttttgttaccaattttaaatattgntaaagaattctccaaggagtaaggttaatgagcaagaataaaatggcagcagcagatccaattgcgttttctttttcataagcctaaaagcatcgccgtgtgtttcagaagctgctttctctacaaaatctgcattcacattngtaa

SEQ ID NO: 47 - DNA, 1589 bp, Homo sapiens
  p57; TACO; CLABP; HCORO1; CLIPINA; FLJ41407; MGC117380
cgagtccccggctcctccagctccttcctcctcttcctcctcctcctccacctccggcttttgggggatcactgtcctctctcggcagcagaatgagccggcaggtggtccgcaccagcaagttccgccacgtgtttggacagccggccaaggccgaccagtgctatgaagatgtgcgcgtctcacagaccacctgggacagtggcttctgtgctgtcaaccctaagtttgtggccctgatctgtgaggccagcgggggaggggccttcctggtgctgcccctgggcaagactggacgtgtggacaagaatgcgcccacggtctgtggccacacagcccctgtgctagacatcgcctggtgcccgcacaatgacaacgtcattgccagtggctccgaggactgcacagtcatggtgtgggagatcccagatgggggcctgatgctgcccctgcgggagcccgtcgtcaccctggagggccacaccaagcgtgtgggcattgtggcctggcacaccacagcccagaacgtgctgctcagtgcaggttgtgacaacgtgatcatggtgtgggacgtgggcactggggcggccatgctgacactgggcccagaggtgcacccagacacgatctacagtgtggactggagccgagatggaggcctcatttgtacctcctgccgtgacaagcgcgtgcgcatcatcgagccccgcaaaggcactgtcgtagctgagaaggaccgtccccacgaggggacccggcccgtgcgtgcagtgttcgtgtcggaggggaagatcctgaccacgggcttcagccgcatgagtgagtggcaggtggcgctgtgggacacaaagcacctggaggagccgctgtccctgcaggagctggacaccagcagcggtgtcctgctgcccttctttgaccctgacaccaacatcgtctacctctgtggcaagggtgacagctcaatccggtactttgagatcacttccgaggcccctttcctgcactatctctccatgttcagttccaaggagtcccagcggggcatgggctacatgcccaaacgtggcctggaggtgaacaagtgtgagatcgccaggttctacaagctgcacgagcggaggtgtgagcccattgccatgacagtgcctcgaaagtcggacctgttccaggaggacctgtacccacccaccgcagggcccgaccctgccctcacggctgaggagtggctggggggtcgggatgctgggcccctcctcatctccctcaaggatggctacgtacccccaaagagccgggagctgagggtcaaccggggcctggacaccgggcgcaggagggcagcaccagaggccagtggcactcccagctcggatgccgtgtctcggctggaggaggagatgcggaagctccaggccacggtgcaggagctccagaagcgcttggacaggctggaggagacagtccaggccaagtagagccccgcagggcctccagcagggtcagacattcacacccatccactcacctcccattcccagccacatgggagagaaaaaaatcataataaaatggctttattttctggt

SEQ ID NO: 48 - DNA, 760 bp, Homo sapiens
  IPL; BRW1C; BWR1C; HLDA2; TSSC3
agagccggcgccgtcaccgcccgcattgccgctcccagtcccgcgctcggcacgacatgaaatcccccgacgaggtgctacgcgagggcgagttggagaagcgcagcgacagcctcttccagctatggaagaagaagcgcggggtgctcacctccgaccgcctgagcctgttccccgccagcccccgcgcgcgccccaaggagctgcgcttccactccatcctcaaggtggactgcgtggagcgcacgggcaagtacgtgtacttcaccatcgtcaccaccgaccacaaggagatcgacttccgctgcgcgggcgagagctgctggaacgcggccatcgcgctggcgctcatcgatttccagaaccgccgcgccctgcaggactttcgcagccgccaggaacgcaccgcacccgccgcacccgccgaggacgccgtggctgccgcggccgccgcaccctccgagccctcggagccctccaggccatccccgcagcccaaaccccgcacgccatgagcccgccgcgggccatacgctggacgagtcggaccgaggctaggacgtggccggcgctctccagccctgcagcagaagaacttcccgtgcgcgcggatcctcgctccgttgcacgggcgccttaagttattggactatctaatatctatgtatttatttcgctggttctttgtagtcacatattttatagtcttaatatcttgtttttgcatcactgtgcccattgcaaataaatcacttggcca

SEQ ID NO: 49 - DNA, 3234 bp, Homo sapiens
  SDR; PS-p68
ggggaacaggaaagaaaagctaaacctgcaacaaagtgtcctgtgcccagaacgcggttaggaagtgtgtgcatacgtctgaaccctaaatggttctcagttctgtaaacttctcctcccactgggtggagtagggcctttaagagcagctggaatgcagttcccctgatcagcgtagccagttgttgcctgtctgaacctctgccagtcctggagactggtgccctgagctccaaccagcgggcctcatcctacaccctcaccaccgcaacttctcacccgagcaagaagcagctcccagagagaaagaacgttcccacctgcctagccatgggagaggacgctgcacaggccgaaaagttccagcaccctgggtctgacatgcggcaggaaaagccctcgagccccagcccgatgccttcctccacaccaagccccagcctgaacctagggaacacagaggaggccatccgggacaactcacaggtgaacgcagtcacggtgctcacgctcctggacaagctggtgaacatgctagacgctgtgcaggagaaccagcacaagatggagcagcgacagatcagtttggagggctccgtgaagggcatccagaatgacctcaccaagctctccaagtaccaggcctccaccagcaacacggtgagcaagctgctggagaagtcccgcaaggtcagcgcccacacgcgcgcggtcaaagagcgcatggataggcagtgcgcacaggtgaagcggctggagaacaaccacgcccagctcctccgacgcaaccatttcaaagtgctcatcttccaggaggaaaatgagatccctgccagcgtgtttgtgaaacagcccgtttccggtgccgtggaagggaaggaggagcttccggatgaaaacaaatccctggaggaaaccctgcacaccgtggacctctcctcagatgatgatttgccccacgatgaggaggccctggaagacagtgccgaggaaaaggtggaagaaagtagggcagagaaaataaaaagatccagcctgaagaaagtggatagcctcaagaaagcattttctcgccagaacatcgagaaaaagatgaacaagctggggacaaagatcgtatctgtagagaggagagagaagattaagaaatctctcacgtcaaatcaccagaaaatatcctcaggaaaaagctcccccttcaaggtttctcccctcactttcgggcggaagaaagtccgagagggagaaagccatgcagaaaatgagaccaagtcagaagacctgcctagcagtgagcagatgccaaatgaccaggaagaggagtcctttgcagagggtcattccgaagcgtccctcgccagcgctctggtggaaggggaaattgcagaggaggctgctgagaaggcgacctccagggggagtaactcggggatggacagcaacatcgacttgactattgtggaagatgaagaggaggagtcagtggccctggaacaggcacagaaggtacgctatgagggtagctacgcgctaacatccgaggaggcggagcgctccgatggggaccccgtgcagcccgccgtgctccaggtgcaccagacctcctgagcttagagccaccgtgccatcctgtgctgtgctcaagcgggcagccagggctgaagaacaaactcttgcacatctccagcacgactcacccactcctgcgttcctgtccaggcagtaatcattgaccatatagtcatagtaagacacacgagaccaggctttaccatgaaagcgacctgtcacggactccacttttaatttgctcttaggttctatctctgtagaatgtctccaagattgaagaagaaactgagcagttgaaaaatgctaatctctttgacttagtcagaaaaaaacagaggataattaagatactagtcatgaaaagtgattcattcttttttgtcattccataagcttgctgaatagtgtaccggtaatatattgtatttccaccgtactctgtgaatctaattattattctttaagtgttgatatataatatacataaatatgtaagctaaacatataactatatgttttaagaagaaaacatctacgaaaggtaaaaagagatgatcagttggttgtttacttgctagaaaccattgttttattgcaaacgaaggaaaaatgaagagattataaaagtcagctaatgaagtaagatacgtagtaaagtcaggactattcaaaaagtaagaaagaaaatttggaaaatgagagaaacaggaaacaaagaatgccgaaaagaatgaaaacagagaaaaaatgtatgtgcttgaaagtaaaatacttacaatagtagcttaactatttcactctttaaataaaaatactaaagaagttcgtatatcctggaataacatgtcatcttcaaaatatttttattttctaatatttttaataataaacattttatagtgttaaagctgtatttttcttaataaataaaggacattacaaatatttctttaaggaagttcaaaaggatgttgtcttgttaacactggaacgaatataaatcttcaaaatacaattaatatatactgttttgtggaaacttagctcatactattctttaatgctcttcaaatttaaactaacccttacattccatgtgatgtgatgtaggcttataagatgctaaaatctataggttttggaagtgaaagattctattttttctttttttgtacataatgggaatttcattccagattatattttatttacatattaatttcacagaatattaatatttcttaacttcttaaagcatgctagcgttttatgtatatgtacacatatattcagacagggtaattttatctgctgcctaacattgtactaaaatattgctttatctgtttttaattacaaaatgctaatgatttcttaaattatagtttaaagacaattggcccaggaagcaaatcccctgcctttagtatgaaccactataagtaaccttacaaatagagttaatccaagacaatattaacaaactgtgctttgtctttaataaaagggataggattaacaaacatattgatggcataacctattcagctatgtccttatttttgcaataatgtaacctcaaatattggattgttgaaccaacaatggctgtgttaaagaagattaaataaaccgaaaaataaaaagcaaaaaaaaaaaaaa

SEQ ID NO: 50 - DNA, 1443 bp, Homo sapiens; identical to SEQ ID NO: 21
  RAD; RAD1; REM3

SEQ ID NO: 51 - DNA, 817 bp, Homo sapiens
  NMU
agtcctgcgtccgggccccgaggcgcagcagggcaccaggtggagcaccagctacgcgtggcgcagcgcagcgtccctagcaccgagcctcccgcagccgccgagatgctgcgaacagagagctgccgccccaggtcgcccgccggacaggtggccgcggcgtccccgctcctgctgctgctgctgctgctcgcctggtgcgcgggcgcctgccgaggtgctccaatattacctcaaggattacagcctgaacaacagctacagttgtggaatgagatagatgatacttgttcgtcttttctgtccattgattctcagcctcaggcatccaacgcactggaggagctttgctttatgattatgggaatgctaccaaagcctcaggaacaagatgaaaaagataatactaaaaggttcttatttcattattcgaagacacagaagttgggcaagtcaaatgttgtgtcgtcagttgtgcatccgttgctgcagctcgttcctcacctgcatgagagaagaatgaagagattcagagtggacgaagaattccaaagtccctttgcaagtcaaagtcgaggatattttttattcaggccacggaatggaagaaggtcagcagggttcatttaaaatggatgccagctaattttccacagagcaatgctatggaatacaaaatgtactgacattttgttttcttctgaaaaaaatccttgctaaatgtactctgttgaaaatccctgtgttgtcaatgttctcagttgtaacaatgttgtaaatgttcaatttgttgaaaattaaaaaatctaaaaataaa

SEQ ID NO: 52 - DNA, 1618 bp, Homo sapiens
  CTB
atgtcccggccgcagcttcgacgctggcgcctcgtctctagcccgccgagcggcgtcccgggtctagcgctgctggcgctgctggcgctgctggcgctgcggctcgcggccgggaccgactgcccatgcccggagcctgagctctgccgcccgattcgccaccatccagatttcgaggtctttgtgtttgatgttggacagaaaacttggaaatcttatgattggtcacagattacaactgtggcaacatttggaaaatatgactcagaacttatgtgctacgctcattcaaaaggagccagagtagtacttaaaggagatgtatccttaaaggatatcattgatcctgctttcagagcatcctggatagctcaaaaacttaatttggccaaaacacaatatatggatggaattaatatagatatagagcaagaagttaattgtttatcacctgaatatgatgcattaactgctttagtcaaagaaactacagactctttccatcgtgaaattgagggatcacaggtaacctttgatgtagcttggtctccaaagaacatagacagaagatgctataattatactggaatcgcagatgcttgtgacttcctctttgtgatgtcttatgatgaacaaagtcagatctggtcagaatgtattgcagcagccaatgctccctataatcagacattaactggatataatgactacatcaagatgagcattaatcctaagaaacttgtaatgggtgttccttggtatggttatgattatacctgcctgaatctgtctgaggatcatgtttgtaccattgcaaaagtccctttccggggggctccttgtagtgacgctgcaggacgtcaggtgccctacaaaacgatcatgaagcaaataaatagttctatttctggaaacctatgggataaagatcagcgggctccttattataactataaagatcctgctggccactttcatcaagtatggtatgataaccctcagagtatttctttaaaggcaacatatatacaaaactatcgcttacggggcattggcatgtggaatgcaaactgtcttgactactctggagatgctgtagccaaacagcaaactgaagaaatgtgggaagtcttaaagccaaagctgttacagagatgaacatcttttgtcaaaccattaagagttagaaagatgatctgtatcaacagatctagtttcttgcatttttattatgttgctatatacttttgttatccgtatactaaaaaaaaagaataaataaatgttttgattgtttgaatttgaaaaatacacacgaatgtcctcagtatccaggaacataaaggcaagaagcaagtcaacttacctattaaatattcctctattagatgtttcaacactataatttaattgggaaaaattgctttcagaattttattatgccatatttcccttcattatagtaaaatatatgctcacgaatcaatgctgatttttaaaatatgtataatctgaagtggaaattgtttgcttagagtttttaaaaacctagtctttgaaaagcagtttgtgctatacttttcccccaaccctccaataaatcttaaatttaaaacct

SEQ ID NO: 53 - DNA, 577 bp, Homo sapiens
  modified_base (471)..(471): a, c, t or g
  modified_base (482)..(482): a, c, t or g
  modified_base (496)..(496): a, c, t or g
  modified_base (502)..(502): a, c, t or g
  modified_base (519)..(519): a, c, t or g
tgcaagtacaagggtaactttattgacccccagctgggcactgcttggcccctacatcattacccccctattttggctgttgcccccatggcactgcctgtcaacttctacaacctggtgatgtctggcatcaacccctcccaaagatggaggggattctcttgcgagtgatggtggcagctgtttcagggggcacagggctaaggctgagacgtgtcacctcaactgaagcagaagaggtggattatggcattggccacgaagaaaaggaaaatgcctccgctcatgctgctggatgctgaggggctgctggtttggctggtgtcgttttgtcctgagagtccagtttgtatctgtaccataaccaggaggctgatggtgagtaggaggaagaggaacgcttcattttggtaggacttcgtggctgtcttggtagcactttttaggtgatcccagggctgtctggagctnttttggtttantgcttttgaacagnctcgtncgaatcttggcctcgangcaaattcctatagtgagccgattaaatcgtaacatgcatactgtcccgtggaagtgg

SEQ ID NO: 54 - DNA, 1235 bp, Homo sapiens
  PIG3
aggagccagaaccactcggcgccgcctggtgcatgggaggggagccgggccaggaacaatatgttagccgtgcactttgacaagccgggaggaccggaaaacctctacgtgaaggaggtggccaagccgagcccgggggagggtgaagtcctcctgaaggtggcggccagcgccctgaaccgggcggacttaatgcagagacaaggccagtatgacccacctccaggagccagcaacattttgggacttgaggcatctggacatgtggcagagctggggcctggctgccagggacactggaagatcggggacacagccatggctctgctccccggtgggggccaggctcagtacgtcactgtccccgaagggctcctcatgcctatcccagagggattgaccctgacccaggctgcagccatcccagaggcctggctcaccgccttccagctgttacatcttgtgggaaatgttcaggctggagactatgtgctaatccatgcaggactgagtggtgtgggcacagctgctatccaactcacccggatggctggagctattcctctggtcacagctggctcccagaagaagcttcaaatggcagaaaagcttggagcagctgctggattcaattacaaaaaagaggatttctctgaagcaacgctgaaattcaccaaaggtgctggagttaatcttattctagactgcataggcggatcctactgggagaagaacgtcaactgcctggctcttgatggtcgatgggttctctatggtctgatgggaggaggtgacatcaatgggcccctgttttcaaagctactttttaagcgaggaagtctgatcaccagtttgctgaggtctagggacaataagtacaagcaaatgctggtgaatgctttcacggagcaaattctgcctcacttctccacggagggcccccaacgtctgctgccggttctggacagaatctacccagtgaccgaaatccaggaggcccataagtacatggaggccaacaagaacataggcaagatcgtcctggaactgccccagtgaaggaggatggggcaggacaggacgcggccaccccaggcctttccagagcaaacctggagaagattcacaatagacaggccaagaaacccggtgcttcctccagagccgtttaaagctgatatgaggaaataaagagtgaactgaaaaaaaaaaaaaaaaaaaaaaaaaaaaaaaaa

SEQ ID NO: 55 - DNA, 1460 bp, Homo sapiens
  MCP; AFCP
gacggcctggcatacccactgcccaccccagtgactgctcttctgcttcaggcctgctggcctcccagcactgcctgcccctccctgtcgggggacatcgcctccacaccggctggggaaggagcccaggggtggggctggtgggtggggctggtggttggggcagccagagaagtaagagggaagtgagaagccgggtggggcaggctggaaggaagacgaacctacgaagcagagatctgaagacagcatgtacacagccattccccagagtggctctccattcccaggctcagtgcaggatccaggcctgcatgtgtggcgggtggagaagctgaagccggtgcctgtggcgcaagagaaccagggcgtcttcttctcgggggactcctacctagtgctgcacaatggcccagaagaggtttcccatctgcacctgtggataggccagcagtcatcccgggatgagcagggggcctgtgccgtgctggctgtgcacctcaacacgctgctgggagagcggcctgtgcagcaccgcgaggtgcagggcaatgagtctgacctcttcatgagctacttcccacggggcctcaagtaccaggaaggtggtgtggagtcagcatttcacaagacctccacaggagccccagctgccatcaagaaactctaccaggtgaaggggaagaagaacatccgtgccaccgagcgggcactgaactgggacagcttcaacactggggactgcttcatcctggacctgggccagaacatcttcgcctggtgtggtggaaagtccaacatcctggaacgcaacaaggcgagggacctggccctggccatccgggacagtgagcgacagggcaaggcccaggtggagattgtcactgatggggaggagcctgctgagatgatccaggtcctgggccccaagcctgctctgaaggagggcaaccctgaggaagacctcacagctgacaaggcaaatgcccaggccgcagctctgtataaggtctctgatgccactggacagatgaacctgaccaaggtggctgactccagcccatttgcccttgaactgctgatatctgatgactgctttgtgctggacaacgggctctgtggcaagatctatatctggaaggggcgaaaagcgaatgagaaggagcggcaggcagccctgcaggtggccgagggcttcatctcgcgcatgcagtacgccccgaacactcaggtggagattctgcctcagggccatgagagtcccatcttcaagcaatttttcaaggactggaaatgagggtgggcgtcttcctgccccatgctcccctgccccccaccacctgcctgcttgcttctctggctgcctggtcagtgcagaggtgccccctgcagatgttcaataaaggagacaagtgctttcccagctcttttcctgcaccaccaaaaaaaaaaaaaaaaaa

SEQ ID NO: 56 - DNA, 1710 bp, Homo sapiens
  p44; MTAP44
cattttgtgcctgcctagctatccagacagagcagctaccctcagctctagctgatactacagacagtacaacagatcaagaagtatggcagtgacaactcgtttgacacggttgcacgaaaagatcctgcaaaatcattttggagggaagcggcttagccttctctataagggtagtgtccatggattccgtaatggagttttgcttgacagatgttgtaatcaagggcctactctaacagtgatttatagtgaagatcatattattggagcatatgcggaagagagttaccaggaaggaaagtatgcttccatcatcctttttgcacttcaagatactaaaatttcagaatggaaactaggactatgtacaccagaaacactgttttgttgtgatgttacaaaatataactccccaactaatttccagatagatggaagaaatagaaaagtgattatggacttaaagacaatggaaaatcttggacttgctcaaaattgtactatctctattcaggattatgaagtttttcgatgcgaagattcactggatgaaagaaagataaaaggggtcattgagctcaggaagagcttactgtctgccttgagaacttatgaaccatatggatccctggttcaacaaatacgaattctgctgctgggtccaattggagctgggaagtccagctttttcaactcagtgaggtctgttttccaagggcatgtaacgcatcaggctttggtgggcactaatacaactgggatatctgagaagtataggacatactctattagagacgggaaagatggcaaatacctgccgtttattctgtgtgactcactggggctgagtgagaaagaaggcggcctgtgcagggatgacatattctatatcttgaacggtaacattcgtgatagataccagtttaatcccatggaatcaatcaaattaaatcatcatgactacattgattccccatcgctgaaggacagaattcattgtgtggcatttgtatttgatgccagctctattcaatacttctcctctcagatgatagtaaagatcaaaagaattcgaagggagttggtaaacgctggtgtggtacatgtggctttgctcactcatgtggatagcatggatttgattacaaaaggtgaccttatagaaatagagagatgtgagcctgtgaggtccaagctagaggaagtccaaagaaaacttggatttgctctttctgacatctcggtggttagcaattattcctctgagtgggagctggaccctgtaaaggatgttctaattctttctgctctgagacgaatgctatgggctgcagatgacttcttagaggatttgccttttgagcaaatagggaatctaagggaggaaattatcaactgtgcacaaggaaaaaaatagatatgtgaaaggttcacgtaaatttcctcacatcacagaagattaaaattcagaaaggagaaaacacagaccaaagagaagtatctaagaccaaagggatgtgttttattaatgtctaggatgaagaaatgcatagaacattgtagtacttgtaaataactagaaataacatgatttagtcataattgtgaaaaatagtaataatttttcttggatttatgttctgtatctgtgaaaaaataaatttcttataaaactcggaaaaaaaaaaaaaaaaaaaaaaaaaaaaa

SEQ ID NO: 57 - DNA, 744 bp, Homo sapiens
  HLA-DRA1
actcccaaaagagcgcccaagaagaaaatggccataagtggagtccctgtgctaggatttttcatcatagctgtgctgatgagcgctcaggaatcatgggctatcaaagaagaacatgtgatcatccaggccgagttctatctgaatcctgaccaatcaggcgagtttatgtttgactttgatggtgatgagattttccatgtggatatggcaaagaaggagacggtctggcggcttgaagaatttggacgatttgccagctttgaggctcaaggtgcattggccaacatagctgtggacaaagccaacttggaaatcatgacaaagcgctccaactatactccgatcaccaatgacaagttcaccccaccagtggtcaatgtcacgtggcttcgaaatggaaaacctgtcaccacaggagtgtcagagacagtcttcctgcccagggaagaccaccttttccgcaagttccactatctccccttcctgccctcaactgaggacgtttacgactgcagggtggagcactggggcttggatgagcctcttctcaagcactgggagtttgatgctccaagccctctcccagagactacagagaacgtggtgtgtgccctgggcctgactgtgggtctggtgggcatcattattgggaccatcttcatcatcaagggattgcgcaaaagcaatgcagcagaacgcagggggcctctgtaaggcacatggaggtgatggtgtttctta

SEQ ID NO: 58 - DNA, 14755 bp, Homo sapiens
  HD1; PCN; EBS1; EBSO; PLTN; PLEC1b
gaggccatgtcgggtgaggacgctgaggtccgggcagtctctgaagatgtctccaatggaagcagtggctcgcccagccctggggacacactgccctggaaccttgggaaaacgcagcggagccggcgcagcgggggtggcgctgggagcaacgggagtgtcctggacccagctgagcgggcggtcattcgcatcgcagatgagcgggatcgtgtgcagaagaaaaccttcaccaagtgggtcaacaagcacctcatcaaggcccagaggcacatcagtgacctgtatgaagacctccgcgatggccacaacctcatctccctgctggaggtcctctcgggggacagcctgccccgggagaaggggaggatgcgtttccacaagctgcagaatgtccagattgccctggactacctccggcaccgccaggtgaagctggtgaacatcaggaatgatgacatcgctgacggcaaccccaagctgacccttggcctcatctggacaatcattctgcacttccagatctcagatatccaggtgagtgggcagtcggaggacatgacggccaaggagaagctgctgctgtggtcgcagcgaatggtggaggggtaccagggcctgcgatgcgacaacttcacctccagctggagagacggccgcctcttcaatgccatcatccaccggcacaagcccctgctcatcgacatgaacaaggtgtaccggcagaccaacctggagaacctggaccaggccttctctgtggcggagcgggacctgggagtgacgcggctcctggaccctgaggacgtggatgtccctcagcccgacgagaagtccatcatcacctacgtctcgtcgctgtatgacgccatgccccgcgtgccggacgtgcaggatggggtgagggccaacgagctgcagctgcgctggcaggagtaccgggagctggtgctgctgctgcttcagtggatgcgacaccacacggccgcctttgaggaacgcaggttcccctccagcttcgaggagattgagatcctgtggtctcagttcctgaagtttaaggagatggagctaccagccaaggaggccgacaagaacaggtccaagggcatctaccaatccctggagggagcggtgcaagcaggccagctcaaggtgccccctggctaccacccgctggatgtggagaaggagtggggcaagctgcacgtggccatcctggagcgggagaagcagctccgcagcgagtttgagaggctggagtgtcttcagcgcatcgtgaccaagctgcagatggaggcggggctgtgtgaggagcagctgaaccaggccgacgccctgctgcagtcggatgtccggctgctggctgcaggcaaagtgccacagcgggcgggggaggtggaacgggacttggacaaggcggatagcatgatccggctgctcttcaacgacgtgcagaccctcaaggatggacggcacccgcagggcgagcagatgtaccgcagggtgtaccgtctgcacgagcgcctggtagccatccgcaccgagtacaacctacggctgaaggcaggcgtggcggcccctgcaacccaggtggcccaggtgactctgcagagtgtgcagaggcgccccgagctggaggactccactctgcgctacctgcaggacctgctggcctgggtggaggagaaccagcaccgtgtggatggcgctgagtggggtgtggacctgcccagcgtggaggcgcagctgggcagccaccgaggcctgcaccagtccatcgaagaattccgggccaagatcgagcgggcacggagtgacgagggccagctctcccccgccacccggggtgcctaccgtgactgcctgggtcggctggacctgcagtacgccaagctgctgaactcctccaaggcccgcctcaggtccctggagagcttgcacagctttgtggcagccgccactaaggagctaatgtggctgaatgagaaggaggaggaggaggtgggcttcgactggagcgaccgcaacaccaacatgaccgccaagaaggagagctactcggcgctgatgcgggagctggagctgaaggagaagaagatcaaggagctccaaaatgctggggaccggctgctgcgggaggaccacccggcccggcccacggtggagtccttccaggcggccctgcagacgcagtggagctggatgctacagctgtgctgctgtatcgaggcacacctgaaggagaacgctgcctactttcagttcttctcagatgtgcgggaggccgaggggcagttgcagaagctgcaggaggcactgcgtaggaaatacagttgtgatcgctccgccaccgtcacccggctggaggacctgctgcaggatgcccaggacgagaaggaacagctgaacgagtacaagggccacctctcaggcctggccaagcgggccaaggccgtcgtgcagctgaagccccgccacccagcccaccccatgcggggccgcctgcccctgctggccgtgtgcgactataagcaggtggaggtgactgtgcacaagggtgacgagtgccagctggtgggccctgcacagccgtcccactggaaggtgctcagcagctccggcagcgaggccgccgtgccctccgtgtgcttcctggtgcccccgcccaaccaggaggcccaggaggccgtcaccaggctggaggcccagcaccaggccctggtcacgctgtggcaccagttgcacgtggacatgaagagccttctggcctggcagagccttcgccgcgacgtgcagctcatccgctcctggtccctggccacgttccgcaccctgaagccagaggagcagcgccaagccctgcacagcctggagctgcactaccaggccttcctgcgggacagccaggacgcgggcggcttcggacccgaggaccggctgatggctgagcgcgagtacggctcctgcagccaccactaccagcagctgctgcagagcctggaacagggtgcacaggaagagtctcgctgccagcgctgcatctccgagctcaaagacatccggctgcagctggaggcctgtgagacgcgcaccgtgcaccgcctgcggctgccgctggacaaagagccggcacgggagtgtgcccagcgcatcgccgagcagcagaaggcacaggcagaggtggaggggctgggcaagggggtcgcccggctctctgccgaggccgagaaggtcttggccctaccagagccatcgcctgcggcccccacgctgcgctcggagctggagctgacgctgggcaagctggagcaggtccgcagcctgtctgccatctacctggagaagctcaagaccatcagcctggtgatccgcggcacgcagggggccgaggaggtgctcagggcccacgaggagcagctcaaggaggcccaggccgtgccggccaccctcccggagctcgaggccaccaaggcctctctgaagaagctgcgggcccaggccgaggcacagcagcccacgttcgacgccctgcgggatgagctgcggggggcacaggaggtgggggagcgactgcagcagcggcacggggagcgggacgtggaggtggagcgctggcgggagcgggtcgcccagttgcttgagcgctggcaggctgtgctggcccagaccgacgtgcggcagcgcgagctcgagcaactgggccgccagctgcgttactaccgcgagagtgcagaccccttgggcgcctggctgcaggacgccaggcggcggcaggagcagatccaggccatgccgctggccgacagccaggctgtgcgggagcagctgcggcaggagcaggccctgctggaggagatcgagcgccacggcgagaaggtcgaggagtgccagaggtttgcgaaacagtacatcaacgccatcaaggactatgaactccagctggtgacgtacaaggcgcagcttgagccggtggcctccccggccaagaagcccaaggtccagtcgggatcagagagtgtcatccaggagtacgtggacctgcgtacgcactacagcgagctgaccacactgacgagccagtacatcaagttcatcagcgagactctgcggcgcatggaggaggaggagaggctggctgagcagcagcgggcagaggagcgcgagcggctggccgaggtggaggccgcgctggagaagcagcggcagctggccgaggcgcacgcccaggcaaaggcacaggcggagcgggaggcgaaggagctgcagcagcgcatgcaggaggaggtggtgcggcgggaggaggcggcggtggacgcgcagcagcagaagcgcagcattcaggaggagctgcagcagctgcggcagagctcggaggcggagatccaggccaaggcccggcaggcagaggcggctgagcgcagccggctgcgcatcgaggaggagatccgcgtggtgcgcctgcagttggaggccaccgagcgccagcgtggcggggctgagggggagctgcaggcactgcgtgcacgggcggaggaggctgaggcacaaaagcgacaggcgcaggaggaggccgagcgcttgcggaggcaggtgcaggacgagagccagcgtaagcggcaggcggaggtggagctggcctcgcgcgtgaaggccgaggccgaggcggcgcgcgagaagcagcgggccctgcaggccctggaggagctgcggctgcaggcggaggaggcggagcggcgcctgcggcaggccgaggtggagcgagcgcggcaggtacaggtggccctggagacggcgcagcgcagtgcagaggcggagctgcagagcaaacgcgcctccttcgccgagaagacggcacagctggagcgctccctgcaggaggaacacgtggctgtggcacagctgcgggaggaggctgagcggcgggcacagcagcaggccgaggccgagcgggcgcgcgaggaggcagagcgggagctggagcgctggcagctcaaggccaacgaggcgctacggctgcggctgcaggcggaggaggtggcgcagcagaagagcctggcgcaggccgaggctgagaagcagaaggaggaggcggagcgcgaggcgcggcggcgcggcaaggcggaggagcaggccgtccggcagcgggagctggctgaacaagagctggagaagcagcggcagctggcggaaggcaccgcgcagcagcgcctggccgcggagcaggagttgatccggctgcgggccgagacggagcagggggagcagcagcggcagctgctggaggaggagctggcccggctgcagcgtgaggcggctgcagccacgcagaaacggcaggagctggaagccgagctggccaaggtgcgggccgagatggaggtgctgctggccagcaaggcgagggctgaggaggagtcgcgctccaccagcgagaagtccaagcagaggctggaggccgaggccggccggttccgcgagctggccgaggaggccgcccgcctgcgtgccctggcggaagaggccaagcggcagcggcagctggccgaggaagacgcggcgcggcagcgggccgaggcggagcgggtgcttgcggagaagctggccgccatcggcgaggccacgcggctcaagacggaggcggagatcgcgctcaaggagaaggaggcggagaacgagcgcctgcggcggctggcggaggacgaggccttccagcggcggcggctggaggagcaggccgcgcaacacaaggctgacatcgaggagcgcctggcccagctgcgcaaggcatcggacagcgagctggagcggcagaaggggctggtggaggacacgctgaggcagcggcggcaggtggaggaggagatcctggcgctgaaggcgagcttcgagaaggcggccgctggcaaggcggagctggagctggagctgggacgcatccgcagcaacgcggaggacacgctgcgcagcaaggagcaggccgagctggaggctgcgaggcagcggcagctggcggcggaggaggagcggcggcgccgtgaggctgaggagcgcgtgcagaagagcctggcggccgaggaggaggccgcacggcagcggaaggcggcgctggaggaagtcgagcggctgaaagccaaggtggaggaggcgcggcgcctgcgggagcgagcggagcaggagtcggcgcggcagctgcagctggcccaggaggccgcccagaagcggctgcaggcggaagagaaggcacacgccttcgcggtgcagcagaaggagcaggagctacagcagacgctgcagcaggagcagagcgtgctggaccagctgcgcggcgaggcggaggcggcccggcgggcggctgaggaggcggaggaggcccgggtgcaggcggagcgtgaggcggcgcagtcccggcggcaggtggaagaggccgagcggctgaagcagtcggcagaggagcaggcacaggcccgggctcaggcacaggcggctgcagagaagctgcgcaaggaggccgagcaagaggcggcgcggcgggcacaggcggagcaggcggccctgcggcagaagcaggcagctgacgcggagatggagaagcataagaaattcgccgagcagacgctgcggcagaaggcgcaggtggagcaggagctgacaacactgcggctgcagctggaggagaccgaccaccagaagaacctgctggacgaggagctgcagcggctgaaggcggaggccacggaggccgcacgccagcgcagccaggtggaggaggagctcttctcggtgcgcgtgcagatggaggagctgagcaagctcaaggcacgcatcgaggctgagaaccgcgcactcatcttgcgtgacaaggacaatacgcagcgcttcctgcaggaggaggctgagaagatgaagcaggtggcggaggaggccgcgcggctgagtgtggcggcccaagaggctgcgcgactgcggcagctggcagaggaggacctggcacagcagcgggccttggcagagaagatgctcaaggagaagatgcaggcggtgcaggaggccacgcgactcaaggctgaggcggaactgctgcagcagcagaaggagcttgcgcaggagcaggcgcggcggctgcaggaggacaaggagcagatggcgcagcagctggcggaggagacgcagggcttccagcggacgctggaggccgagcggcagcggcagctggagatgagcgctgaggctgagcgcctcaagctgcgtgtggccgagatgagccgagcccaggcccgcgctgaggaggacgcccagcgcttccggaagcaggcggaggagatcggtgagaagctgcaccgcacggagctcgccacccaggagaaggtgaccctggtgcagacactggagatccagcgacagcagagtgaccatgatgccgagcgcctgcgggaggccatcgctgagctggagcgtgagaaggagaagctccaacaggaggccaaactgctgcagctcaagtctgaggagatgcagacggtgcagcaggagcagctgctgcaggagacgcaggccctgcagcaaagcttcctctctgaaaaggacagcctgctacagcgggagcgcttcatcgagcaggagaaggccaagctggagcagctcttccaggacgaggtggccaaggcacagcagctgcgtgaggagcagcagcggcagcagcagcagatggagcaggaacggcagcggctggtggccagcatggaggaggcgcggcggcggcagcatgaggccgaggagggcgtgcggcgcaagcaggaggagctgcagcagctggagcagcagcggcggcagcaggaggagctgctggctgaggagaaccagaggctgcgtgagcagctgcagctcctggaggagcagcaccgggccgcgctggcgcactcagaggaggtcactgcctcgcaggtggctgccacaaagaccctgcccaatggccgggatgcacttgatggccccgcggcagaggcagagccggagcacagcttcgatggcctgcggcggaaggtgtcagctcagaggctgcaggaggccggcatcctgagtgcggaggagctgcagcggttggcgcagggccacaccacggtggacgagctcgcacggcgggaagacgtgcgccactacctgcagggccgcagcagtatcgcagggctgttgctgaaggccaccaatgagaagctgagtgtttacgccgccctgcagaggcagctgctgagtcccggcacggccctcatcctgctggaggcgcaggcggcctcaggcttcctgctggaccctgtgcggaaccggcggctgaccgtcaacgaggctgtgaaggagggtgtggtgggccccgagctgcaccacaagctgctgtcggccgagcgcgccgtcactggctacaaggacccctacactggccagcagatctctctcttccaagccatgcagaagggcctcatcgtccgggagcacggcatccgcctgctggaggcccagatcgccacgggcggcgttatcgaccccgtgcacagccaccgcgtgcccgtggacgtggcctaccggcgcggctacttcgacgaggagatgaaccgcgtcctggcggaccccagcgacgacaccaagggcttctttgaccccaacacgcacgagaacctcacgtacctgcagctactggagcgctgcgtggaggaccccgagacgggcctgtgccttctgccactcacggataaggctgccaagggcggggagctggtctacactgactccgaggcccgggacgtctttgagaaggccaccgtgtctgcgccgttcggcaagttccagggcaagacggtgaccatttgggagatcatcaactcggaatacttcacggcagagcagcggcgggacctgctgcggcagttccgcacgggccggatcacagtggagaagatcatcaagatcatcatcacggtggtggaggagcaggagcagaagggccggctttgctttgagggcctgcgcagcctggtgccagccgccgagctgctggagagcagggtcatcgaccgcgagctctaccagcagctgcagcgaggtgagcgctctgtgcgagacgtagccgaggtggacactgtgcggcgggctctccggggtgccaacgtcatcgcgggtgtatggctggaggaggcggggcagaagctgagtatctacaatgccctgaagaaagacctgctgccatccgacatggccgtggccctgttggaagcccaggccggcaccgggcacatcatcgaccccgccaccagcgcccggctgaccgtggacgaggcagtgcgtgctggcctggtgggccccgagtttcatgagaagctgctatcagccgagaaggctgtgacagggtacagggacccctacacagggcagagcgtctccctgttccaggccctgaagaagggcctcattccccgggagcagggcctgcgcctgttggacgcccagctgtccacgggcggcatcgtggaccccagcaagagccaccgcgtgcccctggatgtcgcctgcgcccgaggctgcctggatgaggagaccagcagggccctgtcggcaccaagggccgacgccaaggcctacagtgaccccagcacaggggagccggccacctacggcgagctccagcagcggtgccggcccgaccagctgaccgggctgagcctgctgccgctctcagaaaaggctgctcgggcccggcaggaggagctctactcagagctgcaggcccgtgagacctttgaaaagaccccggttgaggtccccgtgggtggcttcaagggcaggacggtgacggtgtgggagctcatcagctctgagtacttcactgcggagcagcggcaggagctgttgcgtcagttccgcacgggcaaggtcaccgtggagaaggtcatcaagattctcattaccatcgtggaggaggtggagaccctgcggcaggagaggctgtccttcagcggcctccgtgcccctgtgccagccagcgagctcctggcttccggggtcctcagcagagcccagtttgagcagctcaaggacggcaagacgacggtcaaggacctttcggagctgggctccgtgcggacgctgctgcagggcagtggctgcctcgccggcatctacctggaggacaccaaggagaaggtgtccatctacgaggccatgcgccggggcctgctgagagccacaacggctgcgctcctgctggaggcgcaggcggccactggcttcctggtggaccccgtgcggaaccagcgcctgtatgtccacgaggccgtgaaggcgggcgtggtgggccccgagcttcacgagcagctgctgtctgccgagaaggccgtcaccggctacagagacccctactcgggcagcaccatctccctcttccaggccatgcagaagggcctggttctccggcagcacggcatccgcctgctggaggcccagatcgccacgggcggcatcatcgaccccgtgcacagccaccgcgtgcctgtggacgtggcctaccagcgcggctacttcagtgaggagatgaaccgcgtcctggcggaccccagcgacgacaccaagggcttctttgaccccaacacgcatgagaacctcacgtacaggcagctgctggagcggtgcgtggaggaccccgagacgggcttgcgccttctgccactgaaaggggcggagaaggctgaggtggtggagaccacgcaggtgtacactgaggaggagacaagaagggcatttgaagagacacagatcgacattcccggcggcggcagccacggcggctccaccatgtccctgtgggaggtgatgcagtcggacctgatccccgaggagcagcgggcccagctgatggctgacttccaggccggccgggtgaccaaggaacgcatgatcatcatcatcatcgagatcattgagaagacagagatcatccgccagcagggtctggcctcctacgactacgtgcgccgccgcctcacggctgaggacctgttcgaggctcggatcatctctctcgagacctacaacctgctccgggagggcaccaggagcctccgtgaggctctcgaggcggagtccgcctggtgctacctctatggcacgggctccgtggctggtgtctacctgcccggttccaggcagacactgagcatctaccaggctctcaagaaagggctgctgagtgccgaggtggcccgcctgctgctggaggcacaggcagccacaggcttcctgctggacccggtgaagggggagcggctgactgtggatgaggctgtgcggaagggcctcgtggggcccgagctgcacgaccgcctgctctcggctgagcgggcggtcaccggctaccgtgacccctacaccgagcagaccatctcgctcttccaggccatgaagaaggagctgatccctactgaggaggccctgcggctgctggatgcccagctggccaccggcggcatcgtggacccccgcctgggcttccaccttcccctggaggtggcttaccagcgtggctacctcaacaaggacacgcacgaccagctgtcagagcccagcgaggtgcgcagctacgtggacccgtccaccgacgagcgcctcagctacacgcagctgctcaggcggtgccgtcgtgacgacggcaccggccagctgctcctgccactgtcggacgcccgcaagctgaccttccgtggcctgcggaagcagatcaccatggaggagctggtgcgctcgcaggtcatggacgaggccacggcgctgcagctgcgggagggcctgacctccatcgaggaggtcaccaagaacttgcagaagttcctggaaggcaccagctgcatcgctggtgtcttcgtggacgccaccaaggaacggctctcggtgtaccaggccatgaagaagggcatcatccgccccggcacagcctttgagctcctggaggcgcaggcggccaccggttacgtcatcgaccccatcaagggactgaagctgacggtggaggaggctgtgcgtatgggcattgtgggccccgagttcaaggacaagctgctgtcggccgagcgcgccgtcactgggtacaaggacccctactctgggaagctcatctccctcttccaggccatgaagaagggcctgatcctgaaggaccatggcatccgcctgctggaggcccagatcgccacgggcggcatcatcgaccctgaggagagccaccggctgcccgtggaggtggcctacaagcgcggcctcttcgatgaggagatgaacgagatcctgaccgacccctcggacgacaccaagggcttctttgaccctaacacggaggagaacctcacctacctgcagctgatggagcgttgtatcactgacccccagacgggcctgtgtctcttgccgctgaaggagaagaagcgggagcggaagacgtcctccaagtcctccgtgcgcaagcgccgagtggtcatcgtggaccccgagacgggcaaggagatgtcagtgtacgaggcctaccgcaagggcctgattgaccaccagacgtacctggagctgtccgagcaggagtgcgagtgggaggagatcaccatctcctcctcggacggcgtggtcaagtccatgatcatcgaccgccgctccgggcgccagtacgacatcgatgatgccatcgccaagaacctcatcgaccgctcggcactggaccagtaccgcgccggcacgctctccatcaccgagttcgccgacatgctctcgggcaacgccggtggtttccgctcccgttcctcctcggtgggatcctcctcctcctaccccatcagccccgccgtctccaggacccagctggcctcctggtcagaccccactgaggagacgggccccgtggctggcatcctggacacggagacgctggagaaggtgtccatcaccgaggccatgcaccggaacctggtggataacatcacggggcagcggctgctggaggcgcaggcctgcaccgggggcatcatcgaccccagcaccggtgagcgcttccctgtcaccgacgccgtcaacaagggcctggtggacaagatcatggtggaccgcatcaacctggcccagaaggccttctgcggcttcgaggacccacgcaccaagaccaagatgtcggccgcccaggccctgaagaagggctggctctactacgaggccggccagcgcttcctggaggtgcagtacctgaccggcggcttgatcgagcccgacacgccgggccgcgtgcccctggacgaggccctgcagcgcggcacggtggacgcccgcaccgcacagaagctgcgtgacgtgggcgcctactccaagtacctcacctgccctaagaccaagctcaagatctcctataaggacgcgctggaccgcagcatggtggaggagggcacggggctgcggctgctggaggctgccgcgcagtccaccaagggctactacagcccctacagcgtcagcggctccggctctaccgctggctcccgcaccggctcgcgcaccggctcccgggccggctcccgccgcggcagctttgacgccaccggctccggcttctccatgaccttctcttcatcctcctactcctcctcgggctacggccgccgctacgcctcggggtcctcggcctccctggggggccctgagtctgccgtggcctgaggctgcctgcgcccaccccgctctgcatgcggcccagcccggctcccaccgaggcgcgggggccgttttcaacgcttaaaggtgtcttcctcccaagtggtgcctaaagtttaaccaaaaagaccagactaatatattaatatatatctgctgtccagacagcctgtatcttgggggacagggctggcccagccctgctggccgcctcaccccctcgggtctcctcactcccttctacctgccactcacacagccaggtgccttggagggtcccaagctgggccccagcccaccctcctgtcttcccagggtagcccgcctgccagtcctagctgcacagggcagctgggcccaaccctgtctgtagagggccctggtgtttctagcactggcctgcacggtgggccttgctggggacggggggccccagtcagcctctctcccagtctacccagagaagccccttccccatgggaagacgaggccctcgggcccagcccccacagtgctgtctgatctgtgctttccagctcaccccccacactcactcctgagacccctggcctccggcgtcagcctccagcctctgttcccctagtaagtgccttccatgtcggcctctaaccccaggccccgaggacccagacccagtggggaggcggacgttccagccggcatggctgggaactgcagacctgtcctcctggtgggtccaggggcccctccagcttgtggagccccacactggggtgccgcctgcccgtctctctcccatggagccccagccccctttgggcccagggacaccagccaggctctgtgctgaccctcctgttgcacccagccctggtctcagcagcgaccacccctgcctccaccctctgagctttgcatgttccactaaccccgggcgggtggcaggtggaggtgtcaggctgctggcgcctctgcaagggcagaacactaacctgaccgtgggcggggccttgcggtatccgcccccaataaaagcaattccaacctt

SEQ ID NO: 59 - DNA, 853 bp, Homo sapiens
  DRB1; HLA DRB1; HLA-DR1B
gcctgctgctctggcccctggtcctgtcctgttctccagcatggtgtgtctgaggctccctggaggctcctgcatggcagttctgacagtgacactgatggtgctgagctccccactggctttggctggggacaccagaccacgtttcttggagtactctacgtctgagtgtcatttcttcaatgggacggagcgggtgcggtacctggacagatacttccataaccaggaggagaacgtgcgcttcgacagcgacgtgggggagttccgggcggtgacggagctggggcggcctgctgcggagcactggaacagccagaaggacctcctggagcagaagcggggccgggtggacaactactgcagacacaactacggggttgtggagagcttcacagtgcagcggcgagtccatcctaaggtgactgtgtatccttcaaagacccagcccctgcagcaccataacctcctggtctgttctgtgagtggtttctatccaggcagcattgaagtcaggtggttccggaatggccaggaagagaagactggggtggtgtccacaggcctgatccacaatggagactggaccttccagaccctggtgatgctggaaacagttcctcggagtggagaggtttacacctgccaagtggagcacccaagcgtgacaagccctctcacagtggaatggagagcacggtctgaatctgcacagagcaagatgctgagtggagtcgggggctttgtgctgggcctgctcttccttggggccgggctgttcatctacttcaggaatcagaaaggacactctggacttcagccaagaggattcctgagctgaagtgcagatgac

SEQ ID NO: 60 - DNA, 2640 bp, Homo sapiens
  SYND4; MGC22217
actcgccgcagcctgcgcgccttctccagtccgcggtgccatggcccccgcccgtctgttcgcgctgctgctgttcttcgtaggcggagtcgccgagtcgatccgagagactgaggtcatcgacccccaggacctcctagaaggccgatacttctccggagccctaccagacgatgaggatgtagtggggcccgggcaggaatctgatgactttgagctgtctggctctggagatctggatgacttggaagactccatgatcggccctgaagttgtccatcccttggtgcctctagataaccatatccctgagagggcagggtctgggagccaagtccccaccgaacccaagaaactagaggagaatgaggttatccccaagagaatctcacccgttgaagagagtgaggatgtgtccaacaaggtgtcaatgtccagcactgtgcagggcagcaacatctttgagagaacggaggtcctggcagctctgattgtgggtggcatcgtgggcatcctctttgccgtcttcctgatcctactgctcatgtaccgtatgaagaagaaggatgaaggcagctatgacctgggcaagaaacccatctacaagaaagcccccaccaatgagttctacgcgtgaagcttgcttgtgggcactggcttggactttagcggggagggaagccaggggattttgaagggtggacattagggtagggtgaggtcaacctaatactgacttgtcagtatctccagctctgattacctttgaagtgttcagaagagacattgtcttctactgttctgccaggttcttcttgagctttgggcctcagttgccctggcagaaaaatggattcaacttggcctttctgaaggcaagactgggattggatcacttcttaaacttccagttaagaatctaggtccgccctcaagcccatactgaccatgcctcatccagagctcctctgaagccagggggctaacggatgttgtgtggagtcctggctggaggtcctcccccagtggccttcctcccttcctttcacagccggtctctctgccaggaaatgggggaaggaactagaaccacctgcaccttgagatgtttctgtaaatgggtacttgtgatcacactacgggaatctctgtggtatatacctggggccattctaggctctttcaagtgacttttggaaatcaaccttttttatttgggggggaggatggggaaaagagctgagagtttatgctgaaatggatttatagaatatttgtaaatctatttttagtgtttgttcgtttttttaactgttcattcctttgtgcagagtgtatatctctgcctgggcaagagtgtggaggtgccgaggtgtcttcattctctcgcacatttccacagcacctgctaagtttgtatttaatggtttttgtttttgtttttgtttgtttcttgaaaatgagagaagagccggagagatgatttttattaattttttttttttttttttttttttactatttatagctttagatagggcctcccttcccctcttctttctttgttctctttcattaaaccccttccccagttttttttttatactttaaaccccgctcctcatggccttggccctttctgaagctgcttcctcttataaaatagcttttgccgaaacatagtttttttttagcagatcccaaaatataatgaaggggatggtgggatatttgtgtctgtgttcttataatatattattattcttccttggttctagaaaaatagataaatatatttttttcaggaaatagtgtggtgtttccagtttgatgttgctgggtggttgagtgagtgaattttcatgtggctgggtgggtttttgcctttttctcttgccctgttcctggtgccttctgatggggctggaatagttgaggtggatggttctaccctttctgccttctgtttgggacccagctggtgttctttggtttgctttcttcaggctctagggctgtgctatccaatacagtaaccacatgcggctgtttaaagttaagccaattaaaatcacataagattaaaaattccttcctcagttgcactaaccacgtttctagaggcgtcactgtatgtagttcatggctactgtactgacagcgagagcatgtccatctgttggacagcactattctagagaactaaactggcttaacgagtcacagcctcagctgtgctgggacgacccttgtctccctgggtaggggggggggaatgggggagggctgatgaggccccagctggggcctgttgtctgggaccctccctctcctgagaggggaggcctggtggcttagcctgggcaggtcgtgtctcctcctgaccccagtggctgcggtgaggggaaccaccctcccttgctgcaccagtggccattagctcccgtcaccactgcaacccagggtcccagctggctgggtcctcttctgcccccagtgcccttccccttgggctgtgttggagtgagcacctcctctgtaggcacctctcacactgttgtctgttactgattttttttgataaaaagataataaaacctggtactttctaaaaaaaaaaaaaaaaaaaaaaaaaaaaaa

SEQ ID NO: 61 - DNA, 1194 bp, Homo sapiens
  TPS1; TPS2; TPSB1; alpha II
ataaatggggaggggagagcccactgggtagaaggaacagggagcggccaggatgctgaatctgctgctgctggcgctgcccgtcctggcgagccgcgcctacgcggcccctgccccaggccaggccctgcagcgagtgggcatcgtcgggggtcaggaggcccccaggagcaagtggccctggcaggtgagcctgagagtccacggcccatactggatgcacttctgcgggggctccctcatccacccccagtgggtgctgaccgcagcgcactgcgtgggaccggacgtcaaggatctggccgccctcagggtgcaactgcgggagcagcacctctactaccaggaccagctgctgccggtcagcaggatcatcgtgcacccacagttctacaccgcccagatcggagcggacatcgccctgctggagctggaggagccggtgaacgtctccagccacgtccacacggtcaccctgccccctgcctcagagaccttccccccggggatgccgtgctgggtcactggctggggcgatgtggacaatgatgagcgcctcccaccgccatttcctctgaagcaggtgaaggtccccataatggaaaaccacatttgtgacgcaaaataccaccttggcgcctacacgggagacgacgtccgcatcgtccgtgacgacatgctgtgtgccgggaacacccggagggactcatgccagggcgactccggagggcccctggtgtgcaaggtgaatggcacctggctgcaggcgggcgtggtcagctggggcgagggctgtgcccagcccaaccggcctggcatctacacccgtgtcacctactacttggactggatccaccactatgtccccaaaaagccgtgagtcaggcctgggttggccacctgggtcactggaggaccaacccctgctgtccaaaacaccactgcttcctacccaggtggcgactgccccccacaccttccctgccccgtcctgagtgccccttcctgtcctaagccccctgctctcttctgagccccttcccctgtcctgaggacccttccctatcctgagcccccttccctgtcctaagcctgacgcctgcaccgggccctccagccctcccctgcccagatagctggtggtgggcgctaatcctcctgagtgctggacctcattaaagtgcatggaaatca

SEQ ID NO: 62 - DNA, 1323 bp, Homo sapiens
  APOBEC3F
agagctggctgcgccgagccccctgcgcgctgcacatggggcgcctgacggaagcggcggcagcgggcagcggctctcgggctgcaggctgggcagggtcccctcccacgctcctgccgctgtctcccacgtcccccaggtgcgcggccaccatggcgtccagcgacgaggacggcaccaacggcggcgcctcggaggccggcgaggaccgggaggctcccggcgagcggaggcgcctgggggtcttggccaccgcctggctcaccttctacgacatcgccatgaccgcggggtggttggttctagctattgccatggtacgtttttatatggaaaaaggaacacacagaggtttatataaaagtattcagaagacacttaaatttttccagacatttgccttgcttgagatagttcactgtttaattggaattgtacctacttctgtgattgtgactggggtccaagtgagttcaagaatctttatggtgtggctcattactcacagtataaaaccaatccagaatgaagagagtgtggtgctttttctggtcgcgtggactgtgacagagatcactcgctattccttctacacattcagccttcttgaccacttgccatacttcattaaatgggccagatataatttttttatcatcttatatcctgttggagttgctggtgaacttcttacaatatacgctgccttgccgcatgtgaagaaaacaggaatgttttcaataagacttcctaacaaatacaatgtctcttttgactactattattttcttcttataaccatggcatcatatatacctttgtttccacaactctattttcatatgttacgtcaaagaagaaaggtgcttcatggagaggtgattgtagaaaaggatgattaaatgatctctgcaaacaaggtgctttttccagaataaccaagattacctgagtccaagttttaataacaagaataaacaactttgtgaaatatcatggattgtatggtttcttaaaatataacttgagacacgtggtatttgccagtatttgtgttcctcttgtgccagatctattttttacaagaactgtgcaaatatcagtaacttttgggtaggtattgattattaggaaaataattaggtgtattatctgggggaaaaaaaaacttttgctaagttttttttgaaacatgctcaaagctttttaaatcaatatttagaaattagtttaacgatttactattatacctgctagtgatatttatgtgatatttataaatgaaaataaatgcaaaattataacaaaaaaaaaaaaaaaaaa

SEQ ID NO: 63 - DNA, 1705 bp, Homo sapiens
  ERD2L3
gggcggcggcgcgcgggtgcgatcgcggagctgtgaggcgcaggcagggctctggggcacctagagaccggggccggagacgtggcagccgccctgcccgccagaaagtttcctagaagtttgctgggcgcgggcgcacgactgactggctggaccatgaacgtgttccgaatcctcggcgacctgagccacctcctggccatgatcttgctgctggggaagatctggaggtccaagtgctgcaagggcatctctgggaagagccagatcctgtttgctctcgtcttcaccaccaggtacctggacctgttcaccaacttcatctccatctacaacacagtaatgaaggtggtttttctcctctgtgcctatgttacagtgtacatgatatatgggaaattccgtaaaacttttgacagtgagaatgacacattccgcctggagtttcttctggtcccagtcattggcctttccttccttgaaaactacagtttcactctgctggagatcctctggactttctctatctatctggaatcagtggctatcctgccccagctcttcatgatcagcaagactggagaggctgagaccataactactcactacctgttctttctgggtctgtaccgggcactctacctggctaactggatcaggcggtaccagactgagaatttctatgaccaaattgcagtcgtgtctggagtagtacaaaccatcttctactgtgacttcttctacttgtatgtgaccaaagtccttaagggaaagaagttaagtcttccaatgccaatctgaggaccttcagagacagtctacgccttaacaagcacatgaaggaaactattttgaatgttctctttggcaacttatccataatttgggatcaaatgttaaaaccagaaaagtgtttagtgtggatttcagcaaaacctgatcatcccacccagaagaccttctcatcaatagatcgcccttaaagacccattgtaaggtcataaaaaacctcggccacctgcacaaagatggtgcctcactgcaacaagaaaccttaaggtgtcttaccgacgaaataaaaaacataaatgattgttctccaaggcctgagggcaagactcatgatgagcaagtcaaccccaatctggaacaatgtccctcctcttagaatgtcccaactaaagaccagttaaaatattagggtacgttcttgtgaatttccactttccaggtagatgaccaaatttaggtggtcaagatataaaggtgtcagctagttttaagtgtgaaacttatttcactttcacactgccttcaggccagaagcaaaccaaatttaccaggtttggctggaggagttttgtgactcatcttttactggtttgaattttttcaaaccagtggctgatacctgccttgtacttagtaccttaataccaataacctaatggtacttaggcgagtaccatttgcacaatcactgttttacttatgagcagatacagatatatccaaacccttacctactaggtatcctgctagggttttcaattccaattcttgtattaagttttttcctttcagttttaggtgcgaaagtaatcagtcaatccaatatcccccatctttgtcttgaaacaaaaactgttttaagacgtctacgttgaattattcagagaattaagcaataaaagctcacacctta

SEQ ID NO: 64 - DNA, 1104 bp, Homo sapiens
  SERPINE1
  modified_base (290)..(290): a, c, t or g
tagttctstttctctctaacaagcactcaagggcaaggatatgataaatatttaagtacacccctccccaccaagagattggsgggtgaagakctgggcacgcatctkacctttcttcctctattcctataaaaataaaadgaagcagaaatctgcttcaatgagtaaacaagtcacctacactccaaaataacccatgcacactgtttcwrgggagggagatggccaggccaggagagttgggccacatgawgggggacattcactctgccacctgcagcacccctgtnctkgggatkbgttgccagtgccacagtggactctgagatgaaaggstgtttcttccactggcctttkgctkttaccagcctcctccgckgtggcaggcagtacaagagtkatggcaatgtgactggaacagaaataktttctaccaggcacacaaaatctcctgtaagcyccgtagttccgtcctgcaaagggcctcagtgggaaccaggtctkcagacccgagtkggcagagagacgggtggaagcaggtgccccagatkktcccgcagsgttaccgtctgktttkgagaccttaagggagttgtgcttcaaacttctctcccagggtctcaggtkgagactagggagtttgacctaaaggtcctccaaggagaggccaaggtcttggagacagatctggtttaccatcttttaacaaaaggsaaatgtsttctcttccttcagaaagagtcattaacactaaaattcttttcttcggagtttcttctttcccgatgcatctccagttttgtcccagatgaaggcgtctttccccagggtcagggttccatcactttggcccatgaaaaggactgttcctgtggggttgtgccggaccacaaagaggaagggtctgtbcatgatgatctcctcgggggccatgcgggctgagactatgacagctgtggatgaggaggccaccgtgccactctcgttcacctcgatcttcactttctgsagcgcstgcgcgacgtgmgagaggctcttggtctgaaaaatgcgktgaagtcagcctgaaactgtctgaacatgtsggtcattccaggttststa

SEQ ID NO: 65 - DNA, 1165 bp, Homo sapiens
  TPS2; TPSB1; tryptaseC
agaaggaacagggagcggccaggatgctgaatctgctgctgctggcgctgcccgtcctggcgagccgcgcctacgcggcccctgccccaggccaggccctgcagcgagtgggcatcgttgggggtcaggaggcccccaggagcaagtggccctggcaggtgagcctgagagtccgcgaccgatactggatgcacttctgcgggggctccctcatccacccccagtgggtgctgaccgcagcgcactgcgtgggaccggacgtcaaggatctggccgccctcagggtgcaactgcgggagcagcacctctactaccaggaccagctgctgccggtcagcaggatcatcgtgcacccacagttctacaccgcccagatcggagcggacatcgccctgctggagctggaggagccggtgaacgtctccagccacgtccacacggtcaccctgccccctgcctcagagaccttccccccggggatgccgtgctgggtcactggctggggcgatgtggacaatgatgagcgcctcccaccgccatttcctctgaagcaggtgaaggtccccataatggaaaaccacatttgtgacgcaaaataccaccttggcgcctacacgggagacgacgtccgcatcgtccgtgacgacatgctgtgtgccgggaacacccggagggactcatgccagggcgactccggagggcccctggtgtgcaaggtgaatggcacctggctgcaggcgggcgtggtcagctggggcgagggctgtgcccagcccaaccggcctggcatctacacccgtgtcacctactacttggactggatccaccactatgtccccaaaaagccgtgagtcaggcctggggtgtccacctgggtcactggagagccagcccctcctgtccaaaacaccactgcttcctacccaggtggcgactgccccccacaccttccctgccccgtcctgagtgccccttcctgtcctaagccccctgctctcttctgagccccttcccctgtcctgaggacccttccccatcctgagcccccttccctgtcctaagcctgacgcctgcaccgggccctccggccctcccctgcccaggcagctggtggtgggcgctaatcctcctgagtgctggacctcattaaagtgcatggaaatca

SEQ ID NO: 66 - DNA, 2280 bp, Homo sapiens
  TPS2; TPSB1; tryptaseC
atctggaagcataaatggggaggggagagcccactgggtagaaggaacagggagcggccagggtaagtccccactctcagagaccctgacatcagcgtcacctggagcagagtggcccagcttcagactcagagcaccaagacccaggcctgcaggcctggacccaccccggtccccccgtcccagctccattcttcaccccacaatctgtagcccccagccctgccctgtgaggcccggccaggcccacgatgctcctccttgctccccagatgctgaatctgctgctgctggcgctgcccgtcctggcgagccgcgcctacgcggcccctggtgagtcccagccggggtccaccctgcccctcaccacattccacaggtcagggcctgggtgggttctggggaggtcgggctggcccccacacagggaagggctgggcccaggcctggggctgcttcctggtcctgacctggcacctgccccagccccaggccaggccctgcagcgagtgggcatcgttgggggtcaggaggcccccaggagcaagtggccctggcaggtgagcctgagagtccgcgaccgatactggatgcacttctgcgggggctccctcatccacccccagtgggtgctgaccgcagcgcactgcgtgggaccgtgagtctcccggggcctggaggggtggggaagggctggatgtgagccctggctcccgggtgctcctgggggctgcccagggccctgagtgggatcctccgctgcccagggacgtcaaggatctggccgccctcagggtgcaactgcgggagcagcacctctactaccaggaccagctgctgccggtcagcaggatcatcgtgcacccacagttctacaccgcccagatcggagcggacatcgccctgctggagctggaggagccggtgaacgtctccagccacgtccacacggtcaccctgccccctgcctcagagaccttccccccggggatgccgtgctgggtcactggctggggcgatgtggacaatgatggtgggtctggggacagtggaggtggggccagggtcttagccacagcccagcccctgggctccctctgggctccaggtgggggttgcccggccccctcctgaggctgcaccctcttccccacctgcagagcgcctcccaccgccatttcctctgaagcaggtgaaggtccccataatggaaaaccacatttgtgacgcaaaataccaccttggcgcctacacgggagacgacgtccgcatcgtccgtgacgacatgctgtgtgccgggaacacccggagggactcatgccaggtgggccccgcctgtcccccgccccccgccccccaacccccactcccaggcctgttcggcgagcgctgacctctgaccttcccagggcgactccggagggcccctggtgtgcaaggtgaatggcacctggctgcaggcgggcgtggtcagctggggcgagggctgtgcccagcccaaccggcctggcatctacacccgtgtcacctactacttggactggatccaccactatgtccccaaaaagccgtgagtcaggcctggggtgtccacctgggtcactggagagccagcccctcctgtccaaaacaccactgcttcctacccaggtggcgactgccccccacaccttccctgccccgtcctgagtgccccttcctgtcctaagccccctgctctcttctgagccccttcccctgtcctgaggacccttccccatcctgagcccccttccctgtcctaagcctgacgcctgcaccgggccctccggccctcccctgcccaggcagctggtggtgggcgctaatcctcctgagtgctggacctcattaaagtgcatggaaatcactggtgtgcatcgctgtgtttctggttgtggatgtcactgggagagaaggggtccaggtgtgctgaggacacctgccacagtgtgaggtcctagccctcaaggcacagccagtcaccgtgggacggggcctcctgggcagccctggtccccgaggctggcttctccccacacgatgcatccagcattcgggtcacacagagccactcgggcaactcagttgattataaaggacagccaggtccctgcaaccgggtcaagacagaaatggtcaccgggaaccccagggctgcccatcacgagcccctaccccacgcttcccacgagctcttctcccggccctcccgtccatgcttgtgctttgcctaattgtttgcttttgagaacgggattg

SEQ ID NO: 67 - DNA, 490 bp, Homo sapiens
  CALB1
tttttttttttttttttgcagtatactaaatttaatcagagattacacagagtatgacataaaacagcagttgactagaataatttgcaacacatgaaaacagtttagaaaatggatttaggtcatattctctgacagtaagtttgttggaaatacaggcatagaatcagacagatttatgtgtcatctggtgctcccttcccttgtcacatcaacttgaaccgatagttttgtatggatccaagcagtagacatgctgttgattggtaaactaaatctgtaatgagactgttaacttcataaagccacaattaactatattttggtgagtattttagatggaaaagcacattcctcctaatagttagaaataagcttagaaatattttgtgggacagttctatggttgtctaaaataagaatgtttggcttgttatacataattccattattcagtgacaaatgtgcatttgcaaatcacctcgtgccg

SEQ ID NO: 68 - DNA, 1745 bp, Homo sapiens
  PLTP
ccgtcgcccggatcccctgagctgcccgccatcccacgtgaccgcgccgccccccagctccaccgctgagcccgctcgccatggccctcttcggggccctcttcctagcgctgctggcaggcgcacatgcagagttcccaggctgcaagatccgcgtcacctccaaggcgctggagctggtgaagcaggaggggctgcgctttctggagcaagagctggagactatcaccattccggacctgcggggcaaagaaggccacttctactacaacatctctgaggtgaaggtcacagagctgcaactgacatcttccgagctcgatttccagccacagcaggagctgatgcttcaaatcaccaatgcctccttggggctgcgcttccggagacagctgctctactggttcttctatgatgggggctacatcaacgcctcagctgagggtgtgtccatccgcactggtctggagctctcccgggatcccgctggacggatgaaagtgtccaatgtctcctgccaggcctctgtctccagaatgcacgcggccttcgggggaaccttcaagaaggtgtatgattttctctccacgttcatcacctcagggatgcgcttcctcctcaaccagcagatctgccctgtcctctaccacgcagggacggtcctgctcaactccctcctggacaccgtgcctgtgcgcagttctgtggacgagcttgttggcattgactattccctcatgaaggatcctgtggcttccaccagcaacctggacatggacttccggggggccttcttccccctgactgagaggaactggagcctccccaaccgggcagtggagccccagctgcaggaggaagagcggatggtgtatgtggccttctctgagttcttcttcgactctgccatggagagctacttccgggcgggggccctgcagctgttgctggtgggggacaaggtgccccacgacctggacatgctgctgagggccacctactttgggagcattgtcctgctgagcccagcagtgattgactccccattgaagctggagctgcgggtcctggccccaccgcgctgcaccatcaagccctctggcaccaccatctctgtcactgctagcgtcaccattgccctggtcccaccagaccagcctgaggtccagctgtccagcatgactatggacgcccgtctcagcgccaagatggctctccgggggaaggccctgcgcacgcagctggacctgcgcaggttccgaatctattccaaccattctgcactggagtcgctggctctgatcccattacaggcccctctgaagaccatgctgcagattggggtgatgcccatgctcaatgagcggacctggcgtggggtgcagatcccactacctgagggcatcaactttgtgcatgaggtggtgacgaaccatgcgggattcctcaccatcggggctgatctccactttgccaaagggctgcgagaggtgattgagaagaaccggcctgctgatgtcagggcgtccactgcccccacaccgtccacagcagctgtctgagccctcaatccccaagctggcagctgtcattcaggaccccaacccctctcagcccctcttttcccacattcatagcctgtagtgccccctctaacccccagtgccacagagaagacgggatttgaagctgtacccaatttaattccataatcaatctatcaattacagtccgtccaccacctc

SEQ ID NO: 69 - DNA, 1013 bp, Homo sapiens
  TARP
gataaacaacttgatgcagatgtttcccccaagcccactatttttcttccttcaattgctgaaacaaaactccagaaggctggaacatacctttgtcttcttgagaaatttttcccagatattattaagatacattggcaagaaaagaagagcaacacgattctgggatcccaggaggggaacaccatgaagactaacgacacatacatgaaatttagctggttaacggtgccagaagagtcactggacaaagaacacagatgtatcgtcagacatgagaataataaaaacggaattgatcaagaaattatctttcctccaataaagacagatgtcaccacagtggatcccaaatacaattattcaaaggatgcaaatgatgtcatcacaatggatcccaaagacaattggtcaaaagatgcaaatgatacactactgctgcagctcacaaacacctctgcatattacatgtacctcctcctgctcctcaagagtgtggtctattttgccatcatcacctgctgtctgcttggaagaacggctttctgctgcaatggagagaaatcataacagacggtggcacaaggaggccatcttttcctcatcggttattgtccctagaagcgtcttctgaggatctagttgggctttctttctgggtttgggccatttcagttctcatgtgtgtactattctatctattgtataatggttttcaaaccagtgggcacacagagaacctcactctgtaataacaatgaggaatagccatggcgatctccagcaccaatctctccatgttttccacagctcctccagccaacccaaatagcgcctgctatagtgtagacagcctgcggcttctagccttgtccctctcttagtgttctttaatcagataactgcctggaagcctttcattttacacgccctgaagcagtcttctttgctagttgaattatgtggtgtgtttttccgtaataagcaaaataaatttaaaaaaatgaaaagtt

SEQ ID NO: 70 - DNA, 918 bp, Homo sapiens
  TPS1; TPS2; TPSB1; alpha II
tactggatgcacttctgcgggggctccctcatccacccccagtgggtgctgaccgcagcgcactgcgtgggaccggtgcaactgcgggagcagcacctctactaccaggaccagctgctgccggtcagcaggatcatcgtgcacccacagttctacaccgcccagatcggagcggacatcgccctgctggagctggaggagccggtgaacgtctccagccacgtccacacggtcaccctgccccctgcctcagagaccttccccccggggatgccgtgctgggtcactggctggggcgatgtggacaatgatgagcgcctcccaccgccatttcctctgaagcaggtgaaggtccccataatggaaaaccacatttgtgacgcaaaataccaccttggcgcctacacgggagacgacgtccgcatcgtccgtgacgacatgctgtgtgccgggaacacccggagggactcatgccagggcgactccggagggcccctggtgtgcaaggtgaatggcacctggctgcaggcgggcgtggtcagctggggcgagggctgtgcccagcccaaccggcctggcatctacacccgtgtcacctactacttggactggatccaccactatgtccccaaaaagccgtgagtcaggcctgggttggccacctgggtcactggaggaccaacccctgctgtccaaaacaccactgcttcctacccaggtggcgactgccccccacaccttccctgccccgtcctgagtgccccttcctgtcctaagccccctgctctcttctgagccccttcccctgtcctgaggacccttccccatcctgagcccccttccctgtcctaagcctgacgcctgcaccgggccctccggccctcccctgcccagatagctggtggtgggcgctaatcc

SEQ ID NO: 71 - DNA, 542 bp, Homo sapiens
  PXDN
  modified_base (523)..(523): a, c, t or g
  modified_base (535)..(535): a, c, t or g
atataatgagagatataatttttgttaataagacaaaggtaatatattggatacaaagacacaaatgtattgtgtgttcaattattttgttgtcttgagatttaatattctttccaagagcttttaatgaagcagagagctagtacttcattttcactggatacattttcagcatcatgagttgtcacagcctctgagcccctgatctgaagccagaagggctgagtgtattgtaaacttattcttgcatgttgctgtctgggaatggaccacactacagcaggtagttctgggggcgatactgccgaaaggcccgaacacatgtattttggctgcaattgaggaacttgggatgctattaattttgtatttcagcaactgccccttctcctatcccaaagcaccaattactgccctctgcctcagcagtaccagtataagatgacattccaaagactggaggcaactcagcctgagttaattcacaaaattatgccatgctggggcttgagcttgagcttgngcttaggcttgngctcagc

SEQ ID NO: 72 - DNA, 931 bp, Homo sapiens
  EPA; EPO; HCI; CLGI; TIMP; FLJ90373
tttcgtcggcccgccccttggcttctgcactgatggtgggtggatgagtaatgcatccaggaagcctggaggcctgtggtttccgcacccgctgccacccccgcccctagcgtggacatttatcctctagcgctcaggccctgccgccatcgccgcagatccagcgcccagagagacaccagagaacccaccatggccccctttgagcccctggcttctggcatcctgttgttgctgtggctgatagcccccagcagggcctgcacctgtgtcccaccccacccacagacggccttctgcaattccgacctcgtcatcagggccaagttcgtggggacaccagaagtcaaccagaccaccttataccagcgttatgagatcaagatgaccaagatgtataaagggttccaagccttaggggatgccgctgacatccggttcgtctacacccccgccatggagagtgtctgcggatacttccacaggtcccacaaccgcagcgaggagtttctcattgctggaaaactgcaggatggactcttgcacatcactacctgcagttttgtggctccctggaacagcctgagcttagctcagcgccggggcttcaccaagacctacactgttggctgtgaggaatgcacagtgtttccctgtttatccatcccctgcaaactgcagagtggcactcattgcttgtggacggaccagctcctccaaggctctgaaaagggcttccagtcccgtcaccttgcctgcctgcctcgggagccagggctgtgcacctggcagtccctgcggtcccagatagcctgaatcctgcccggagtggaagctgaagcctgcacagtgtccaccctgttcccactcccatctttcttccggacaatgaaataaagagttaccacccagcagaaaaaaaaaaaaaaaa

SEQ ID NO: 73 - DNA, 919 bp, Homo sapiens
  modified_base (572)..(572): a, c, t or g
  modified_base (633)..(633): a, c, t or g
ttttttttttttttttttttttttttttttttttttttgctctttcagccatttctttttatttacagtttgtgttcaatgcaaatcaattccataagaagttactatgaatcaaagcgtaaatacacaaacacaatatacaatccaaaacagatgtacagcattctggaataaagcaagagtgttcattcacacacacagtagcttcaaaactgttcgatctgtttgttcccatgtagttttctaaagatggaaaaaaaggactttggtcatcaagactactgtggccatattagattactggaacatctaagcatcagtgtgtgaccatgcgaacaaaagacttcggggagtgtctatttttaaaaaggtttatgtgtgtcgaggcagttgtaaaagatttactgcagaatcaagcccacttttaggcttaggaccaggttctaactatctaaaaatattgactgataacaaaaagtgttctaaatgtggctattctgatccatagttgttttttaaagacaaaaaatgtatatacagaaagagtataagagtttgtgaatttaatgcanattagcttccagtcttcacttccccaaatactgatttatagttttggactcctttactttntggcgtcttaatttcaagatttgaaattttggcctccaaaccaggccttttttgtgaattttgaaagagtttcacaccattggcaggattaaaacgcttttggatggtcggggcccgggggctacagcgtgtactcccaccactttggggaggcgaggcggttggttccctgaggtccagagtttcaaacccgccggggcacctgggaaacctcgtctcactcaaattacaaaattgagccgggcggggggcgggtctggaatccagccacttgggaggtggaggc

SEQ ID NO: 74 - DNA, 768 bp, Homo sapiens
  TPS1; TPS2; TPSB1; alpha II
gcctacgcggcccctgccccagtccaggccctgcagcaagcgggtatcgtcgggggtcaggaggcccccaggagcaagtggccctggcaggtgagcctgagagtccgcgaccgatactggatgcacttctgtgggggctccctcatccacccccagtgggtgctgaccgcggcgcactgcctgggaccggtgcaactgcgggagcagcacctctactaccaggaccagctgctgccggtcagcaggatcatcgtgcacccacagttctacatcatccagactggagcggatatcgccctgctggagctggaggagcccgtgaacatctccagccgcgtccacacggtcatgctgccccctgcctcggagaccttccccccggggatgccgtgctgggtcactggctggggcgatgtggacaatgatgagcccctcccaccgccatttcccctgaagcaggtgaaggtccccataatggaaaaccacatttgtgacgcaaaataccaccttggcgcctacacgggagacgacgtccgcatcatccgtgacgacatgctgtgtgccgggaacacccggagggactcatgccagggcgactctggagggcccctggtgtgcaaggtgaatggcacctggctacaggcgggcgtggtcagctgggacgagggctgtgcccagcccaaccggcctggcatctacacccgtgtcacctactacttggactggatccaccactatgtccccaaaaagccgtgagtcaggcctggg

SEQ ID NO: 75 - DNA, 2768 bp, Homo sapiens
  UB1; CEP3; BORG2; FLJ46903
ggcctggccggggcggcgcactcaggtggcctcgcttccctgcgggtcaccgcccgccactcgcacagctaggtcggcctgttgggatcgggagaggtgggcgcacgagttttagtgcgggagtccggggtgcgggcggagtcctattgtccccgtgcacccgggcggcagcacctccgggtccctctttaaaccgagcgtccggcgacctttctttgtgcttagggagtcgaaagcggcatcttctccgagagaagtcgcctactggggggtggcgctggggaggtaacaatgggcgcccattgtcctccgagggtccaacggtgaccccccccgctgcgcacgcgcccggccaccggttggccccgggccagggcacaggtaccgcggccgggagggtcggccccgctgcccgcgccctccgccccgccccagtgagtccccgcgccgccggccccgccccgcgccgccccgccctccgcaggttcagtcctcgcgtccggccgccccgcgctcagtcgcgcgcaccttctctcgcggccgggggaccgcagcgcggggctagcccggagacccggccaccggcctggggcgccttcacgccgtctcggagcggataatgcggtgagcaggcaccacgccggcagactcggctggatctgcgcacagcggcagggattgcgtgcgcccgcgggaggcccggggcagcggctgggatcctcagcggcggccggtttgtcctggttgtggtcaagactggatgatgtaactggctctctaggaagcctcacttggccgtaacctcaggaaggttctctttgaccccatctcatttcgaagccacttctgaagccacttgagaaaaatgatgtgacagttcctatcaaaaaggattcagaaacatataccatctgtgaagaaagtggccctttctcccgcttgcaaaatagacattctcaaattccaaaatgccagccaagaccccaatttacctgaaagcagccaataacaagaaaggaaagaaatttaaactgagggacattctgtctcctgatatgatcagtcccccgcttggagactttcgccacaccatccacattggcaaagagggccagcacgatgtctttggagatatttcctttcttcaagggaactacgagcttttacctggaaaccaggagaaagcacacctgggccagttccctgggcataatgagttcttccgggccaacagcacctcggactctgtgttcacagaaacgccctccccggtgctcaaaaatgccatctccctcccgaccattggaggatcccaagctctcatgttgcccttattgtcaccagtgacatttaattccaaacaggagtccttcgggccagcaaagctgcccaggcttagctgcgagcccgtcatggaggaaaaagctcaggagaaaagcagtctgttggagaatgggacagtccaccagggagacacctcgtggggctccagcggttctgcatctcagtccagccaaggcagagacagccactcctccagcctgtccgaacagtaccccgactggccagccgaggacatgtttgaccatcccaccccatgcgagctcatcaagggaaagactaagtcagaggagtccctctctgaccttacaggttccctcctctccctgcagcttgatcttgggccctcacttttggatgaggtgctgaatgtaatggataaaaataagtaacaagatgccaacttttttcctttggggtaaaaggtacaaaaacaaactaaccacagttgaagagaagggcttccggagctgtatttgcagttttgtgttgggttttctaaaataatattcttacaaagtatttttttacctgttatgccctgtttgcaaaaacaatttagaaaaaaacaacaaagcaaaacctatcttggcaaaaaaaggaagtgagtcagagcccattttcaggaggcattggtgatgttcggctcacatattgtttgcagacacacaagaaatctggcttggccaggattggcactagctatgaagggctgagcgagtcacattaaggaacttcacggaactttatagcactccgacattttctgagcaagaggaagtcaaaatttatttaacacctaagcctttttgtagactcttttctatatattgcttaggctcaccatagcgaattctccagtgttaaaacttttctgttttcacatttgaactttatgggttttggggattttcttgtagttcttatatatccctatatattatatctatattgcaaaattttgactgtcagctacatgttggtaagacacaggcaaagtattactgtaactaagttatttttaaagttaaaatatatttttacgtgcctttggctttttattgcagagtctacattttatagattctacatcagatgttgtcacttatttccattgggattccattgtaagctgtgtatgtgcgtgtttggaaaagtgtattcatacttagtttttttttcttcatctgttatcatacttttaacagcaaccaataacggattgtaaagtgtaaaggcacaggttactcatgatgcttctgcagagactgtgggctacaccacatatgttatttggaaatataggtattttagtacagtacatacttgcattacataggtacttcaagcaacacaataaaaagtaaatgataaaaaaaaaaaaaaaaaaaaaaaaaaaaaaaaaaaaaaaaaaaaaaaaaaaaaag

SEQ ID NO: 76 - DNA, 2472 bp, Homo sapiens
  SLP76; SLP-76
gaagagaccatatttgttcgcagaggaagccgttgctttctgggatctggctacgccagaaaagacatcggctccaacaggggtgttccacagggtagctgggagttggaagagccaagaacgcctccgagctctggatttgagcttctctgcccatgggtgaagcgcccatgctcagcttgtgagcttcttcccgggagagcagccatggcactgaggaatgtgccctttcgctcagaggtcctgggctgggaccccgacagccttgctgactatttcaagaagctcaactataaggactgtgagaaggcagtgaagaagtaccacatcgatggggctcgcttcttgaacctgacagaaaatgacatccagaagttccccaagctccgggtgccgattctcagtaagttaagtcaggaaatcaacaagaacgaagagaggaggagcatcttcacacgcaaaccccaagtcccgcggtttcctgaagagacagaaagccacgaagaggacaatgggggctggtcgtcctttgaagaagacgattatgaaagtcccaatgatgaccaggatggggaggatgatggagactatgagtcccccaatgaggaggaagaggcacccgtggaagatgacgcggattatgagccgccaccctccaatgacgaggaagctctgcagaactccatcctgcctgccaagcctttccccaactccaactccatgtacatcgaccggcccccctctgggaaaaccccccagcagcctcctgtgcccccccagagaccgatggccgccctcccgcccccaccagccggccggaatcactcgccactgcccccaccccagaccaaccacgaagaacccagcagaagcagaaaccacaaaacggcaaagctccctgctccttcaatagacagaagcacgaaacctcccctagatcgttcattagctccgtttgatagagaacccttcacactaggaaagaaaccaccattttctgacaagccctcgattccagcgggaaggtcactcggggagcatttacccaagattcaaaagcctcctttaccaccgaccacggaaagacatgaaaggagcagccccctgccagggaagaagccacctgtgccaaagcatggatggggaccagacagaagagagaatgatgaagatgatgtgcatcagagacctttgccccagccagcactacttcctatgagctccaacactttcccttcaagatctactaagccaagtcccatgaaccctctcccatcctctcacatgcctggagcattctcagaaagtaacagcagttttccacagagtgcctccctgccaccatacttctctcaaggccctagcaacagaccacctatcagagccgaaggcagaaacttccccttgccacttccaaacaaacctcggcccccatcccccgcggaggaagagaattcattaaatgaagagtggtacgtttcttatattacccgaccagaggcagaagctgctcttagaaagataaaccaggatggcacatttctggtcagagacagctctaaaaaaacaacaaccaatccatatgtcctcatggtgttgtacaaagataaagtttacaacatccagatccgttatcagaaggaaagtcaagtttacttgttgggaactggactccgagggaaagaggactttctgtctgtgtcagatattattgactacttcaggaaaatgccacttctgctcattgatgggaaaaaccgaggttccagataccagtgcacattaacgcatgctgcagggtacccatagcaagttatagccgagcaaatgaaccgtcctcctgcctctgttgccaacacgagatcaatcagccttggtcaatggacaaacacttaggactgaactgaacccctccccatgaacacaagggttttatcctttcctttaaaaacagtgtttgaaatgaagactgtcaactatcccataatttatttattcttcttcaatgtttgtaaagtgcatgagtcatgttcacacttgaagtctagtagtgcactgtaataattcattttttaaaagattatttaatgcccatttcaaaatacagtagtttacacagctacagaaacaatttggggcaagttttaaaacactgaaacagtaatagttattggtgtcacataaaactgatttgttttttacagccaaacctctgtcagtcagaggcattcattagttttatacatgtaatttgaaaatcactaaacctcgttttctcagcagcaataatttaagaggcttcaaaaatataatttcactcttatttagtattttttcctgggggcatttttacgtaatttttttatgaaaagacaaatgcatgttgagataacttctgggattaaaatagtcttttgctttaaaaaaaaaaaaaaaaaaaaaaaaaaaaaaaaaaaaaaaaaaaaaaaaaaa

SEQ ID NO: 77 - DNA, 2809 bp, Homo sapiens
  CD33L; OBBP1; CD33L1; CDw327; SIGLEC-6
gcgggacacagtctcttctcctctgctcttctttgggcagagggtctcaaagtttccgtctgctctgtgcagagggagtggagctccgagggcttgtggcttcgcagttcctcttctgtgaacagccgagatcacgcgctcctccccagccacccgttcctccccgcagtccttcccctccactcccttccccttctctgctcatgcagggagcccagaaagcctccgcctcagagatgctaccgctgctgctgcccctgctgtgggcaggggccctggctcaggagcggagattccagctggaggggccagagtcactgacggtgcaggagggtctgtgcgtcctcgtaccctgcagattgcccactacccttccagcctcgtactatggttatggctactggttcctggaaggggctgatgttccagtggccacaaacgacccagacgaagaagtgcaggaggagacccggggccgattccacctcctctgggatcccagaaggaagaactgctccctgagcatcagagatgcccggaggagggacaatgctgcatacttctttcggttgaagtccaaatggatgaaatacggttatacatcttccaagctctctgtgcgtgtgatggccctgacccacaggcccaacatctccatcccagggaccctggagtctggccatcccagcaatctgacctgctctgtgccctgggtctgtgagcaggggacgccccccatcttctcctggatgtcagctgcccccacctccctgggccccaggaccacccagtcctcggtgctcacaatcaccccacggccccaggaccacagcaccaacctcacctgtcaggtgacgttccctggagccggtgtgaccatggagagaaccatccagctcaatgtctcctatgctccacagaaagtggccatcagcatcttccaaggaaacagcgcagccttcaaaatcctgcaaaacacctcgtccctccctgtcctggagggccaggctctgcggctgctctgtgatgctgacggcaacccccctgcacacctgagctggttccagggcttccccgccctgaacgccacccccatctccaataccggggtcctggagctgcctcaagtagggtctgcagaagaaggagatttcacctgccgtgctcagcatcctctgggctccctgcaaatctctctgagtctctttgtgcattggaaaccagaaggcagggctggtggtgtcctgggagcagtctggggagctagcatcacaaccctggttttcctctgtgtttgcttcatcttcagagtgaagactagaaggaagaaagcagcccagccagtgcaaaacacggatgatgtgaaccccgtcatggtctcaggctccaggggtcatcagcaccagttccagacaggcatagtttcagaccaccctgctgaggctggccccatctcagaagatgagcaggagctccactacgctgtcctacacttccacaaggtgcaacctcaggaaccaaaggtcaccgacactgagtactcagaaatcaagatacacaagtgaggaattgtccaaagccataaccttgattggagagaacatggtacctctcagtgtattggttactagggctgccacagcaatgtaccacaaaccgagtgacataaacacagaactttattttcgtatagtttcagatgttagaggtctgagaacaaggtgttatcagggttggtcccttctaaggcctctcttgttggcttgtagatggctgtctcctccttgtgtcttcacatggtctttcctctgagtgtgtttgtgtcctaatcttctcttcttataaagacactagtcatattggattagggcctccccatgacctaatttaaataaattaactatttaaagaccctccaaatacagtaaccttctggatattagatttaggacttccaacatataattttagaagggaacaatttagcccataacactgtgtccaattcttttaaaattaatgtttttgttgtaaatggactatataaataccttcgtatatatggcagaccgcagacttctgtccaagagaactgagttcaactccatctatgccagcctgggcaacagagcgagactccaactcagaaaaagcaaaacaaaacaaacaaacaagcaaaaaaccacaattagactgacagctgacttttttaggagcaatattggaaggctaaatgcaatagaaagatgtctttgatgccttaagagaaataaatgttgttttagaaagcctactcaatgaaaacacattttaagactgaaagtgaaatatagatattttaaggaaaaccaaaatatgtgagtgttaataaagaaaagatttctcaaataaattctaaaacatataattcaggtattaggaaagtgatcccagattagatttttgagatccaaaaaaaatgcaaaacctaggaaagtagcaaatatgtgagcaaaatgaaacaaatacttgttgtaaaaatgatggtttgtagaggggtcaaacatcaaatgtaatattgaaataccaatattatatagcccagaaactataataacataaagttcagaagagtgtaaatagaatttatattaccataaagtcctttatatttttccagagaaaattaaatgttatgatgaatgttacatttggataatttattattgtaatctcgaggaaatttacttaaagaatcgaagccaagtttaccacctgtgaactagaggaagtataaaaggtgatagaaacattattcagtcaaaccaga

SEQ ID NO: 78 - DNA, 593 bp, Homo sapiens
  ALCAM
  modified_base (593)..(593): a, c, t or g
tttttttgaagacatatttcagttttattatcttttaggcatagacgggtatgttaatccatttccacaaacaattcctataatcacatatagggagtgaaccttgaacttgcaaaacctgtttcctgttgccaaagagttaaattggagagccgaaacctcaaaagttgaggatttggaattctttttcttcttagcatcttcgtgcatgtggctgccattaaacaagtaagctttcctctttatccaggcactgaatcgatggtaataatgttgtctttttttttcctggcaaactttctgctttcggtccagagctctgagtttctcatgttctgctctcgaggttctgacagctgtttttggacttaattaaccattgcaagtggaaaccaagaaataattgtagcataactctctctattgtcatgttgcttcttctggcaaatatatctagaagttagactttaaaccttgatctcccacaccaaaagagaaaataatatttatatggaagtaattttattttagtgttgggaatttattgtggagagcaggtgtttaaaaattttggaattctttaaccaaattcn

SEQ ID NO: 79 - DNA, 814 bp, Homo sapiens
  GAL
  modified_base (45)..(45): a, c, t or g
ccggtccggaattcccgggatctcccgggcgcgccgcatatatancagcggcggcggtggcggcggccacaccgggcggcggacacgtggagggacccggcccgcgccttctgcccctgctgccggccgcgccatgcggtgagcgccccaggccgccagagcccacccgacccggcccgacgcccggacctgccgcccagacccgccaccgcacccggaccccgacgctccgaacccgggcgcacgcagctcaagatggcccgaggcagcgccctcctgctcgcctccctcctcctcgccgcggccctttctgcctctgcggggctctggtcgccggccaaggaaaaacgaggctggaccctgaacagcgcgggctacctgctgggcccacatgccgttggcaaccacaggtcattcagcgacaagaatggcctcaccagcaagcgggagctgcggcccgaagatgacatgaaaccaggaagctttgacaggtccatacctgaaaacaatatcatgcgcacaatcattgagtttctgtctttcttgcatctcaaagaggccggtgccctcgaccgcctcctggatctccccgccgcagcctcctcagaagacatcgagcggtcctgagagcctcctgggcatgtttgtctgtgtgctgtaacctgaagtcaaaccttaagataatggataatcttcggccaatttatgcagagtcagccattcctgttctctttgccttgatgttgtgttgttatcatttaagatttttttttttggtaattattttgagtggcaaaataaagaatagcaatta

SEQ ID NO: 80 - DNA, 523 bp, Homo sapiens
  CDW52
ctcctggttcaaaagcagctaaaccaaaagaagcctccagacagccctgagatcacctaaaaagctgctaccaagacagccacgaagatcctaccaaaatgaagcgcttcctcttcctcctactcaccatcagcctcctggttatggtacagatacaaactggactctcaggacaaaacgacaccagccaaaccagcagcccctcagcatccagcaacataagcggaggcattttccttttcttcgtggccaatgccataatccacctcttctgcttcagttgaggtgacacgtctcagccttagccctgtgccccctgaaacagctgccaccatcactcgcaagagaatcccctccatctttgggaggggttgatgccagacatcaccaggttgtagaagttgacaggcagtgccatgggggcaacagccaaaataggggggtaatgatgtaggggccaagcagtgcccagctgggggtcaataaagttacccttgtacttgcaaaaaaaaaaaaaaaaaaa

SEQ ID NO: 81 - DNA, 1589 bp, Homo sapiens
  TRAP1
ctcgcgtgtcccgggtcgggagtcggagacgcaggtgcaggagagtgcggggcaagtagcgcattttctctttgcattctcgagatcgcttagccgcgctttaaaaaggtttgcatcagctgtgagtccatctgacaagcgaggaaactaaggctgagaagtgggaggcgttgccatctgcaggcccaggcaacctgctacgggaagaccggggaccaagacctctgggttggctttcctagacccgctcgggtcttcgggtgtcgcgaggaagggccctgctcctttcgttccctgcacccctggccgctgcaggtggctccctggaggaggagctcccacgcggaggaggagccagggcagctgggagcggggacaccatcctcctggataagaggcagaggccgggaggaaccccgtcagccgggcgggcaggaagctctgggagtagcctcatggaagagaagcagatcctgtgcgtggggctagtggtgctggacgtcatcagcctggtggacaagtaccctaaggaggactcggagataaggtgtttgtcccagagatggcagcgcggaggcaacgcgtccaactcctgcaccattctctccctgctcggagccccctgtgccttcatgggctcaatggctcctggccatgttgctgattttgtcctggatgacctccgccgttattctgtggacctacgctacacagtctttcagaccacaggctccgtccccatcgccacggtcatcatcaacgaggccagtggtagccgcaccatcctatactatgacaggagcctgccagatgtgtctgctacagactttgagaaggttgatctgacccagttcaagtggatccacattgagggccggaacgcatcggagcaggtgaagatgctgcagcggatagacgcacacaacaccaggcagcctccagagcagaagatccgggtgtccgtggaggtggagaagccacgagaggagctcttccagctgtttggctacggagacgtggtgtttgtcagcaaagatgtggccaagcacttggggttccagtcagcagaggaagccttgaggggcttgtatggtcgtgtgaggaaaggggctgtgcttgtctgtgcctgggctgaggagggcgccgacgccctgggccctgatggcaaattgctccactcggatgctttcccgccaccccgcgtggtggatacactgggagctggagacaccttcaatgcctccgtcatcttcagcctctcccaggggaggagcgtgcaggaagcactgagattcgggtgccaggtggccggcaagaagtgtggcctgcagggctttgatggcatcgtgtgagagcaggtgccggctcctcacacaccatggagactaccattgcggctgcatcgccttctcccctccatccagcctggcgtccaggttgccctgttcaggggacagatgcaagctgtggggaggactctgcctgtgtcctgtgttccccacagggagaggctctggggggatggctgggggatgcagagcctcagagcaaataaatcttcctcagagccaaaaaaaaaaaaaaaaaaa

SEQ ID NO: 82 - DNA, 1194 bp, Homo sapiens; identical to SEQ ID NO: 61
  TPSAB1

SEQ ID NO: 83 - DNA, 884 bp, Homo sapiens
  TPS1; TPS2; TPSB1; alpha II
agtggccaggatgctgagcctgctgctgctggcgctgcccgtcctggcgagcccggcctacgcggcccctgccccagtccaggccctgcagcaagcgggtatcgtcgggggtcaggaggcccccaggagcaagtggccctggcaggtgagcctgagagtccgcgaccgatactggatgcacttctgtgggggctccctcatccacccccagtgggtgctgaccgcggcgcactgcctgggaccggacgtcaaggatctggccaccctcagggtgcaactgcgggagcagcacctctactaccaggaccagctgctgccggtcagcaggatcatcgtgcacccacagttctacatcatccagactggagcggatatcgccctgctggagctggaggagcccgtgaacatctccagccgcgtccacacggtcatgctgccccctgcctcggagaccttccccccggggatgccgtgctgggtcactggctggggcgatgtggacaatgatgagcccctcccaccgccatttcccctgaagcaggtgaaggtccccataatggaaaaccacatttgtgacgcaaaataccaccttggcgcctacacgggagacgacgtccgcatcatccgtgacgacatgctgtgtgccgggaacacccggagggactcatgccagggcgactctggagggcccctggtgtgcaaggtgaatggcacctggctacaggcgggcgtggtcagctgggacgagggctgtgcccagcccaaccggcctggcatctacacccgtgtcacctactacttggactggatccaccactatgtccccaaaaagccgtgagtcaggcctggggtgtccacctgggtcactggagagccagcccctc

SEQ ID NO: 84 - DNA, 428 bp, Homo sapiens
  P8; MIF; NIF; CAGA; CFAG; CGLA; L1Ag; MRP8; CP-10; MA387; 60B8AG
atgtctcttgtcagctgtctttcagaagacctggtggggcaagtccgtgggcatcatgttgaccgagctggagaaagccttgaactctatcatcgacgtctaccacaagtactccctgataaaggggaatttccatgccgtctacagggatgacctgaagaaattgctagagaccgagtgtcctcagtatatcaggaaaaagggtgcagacgtctggttcaaagagttggatatcaacactgatggtgcagttaacttccaggagttcctcattctggtgataaagatgggcgtggcagcccacaaaaaaagccatgaagaaagccacaaagagtagctgagttactgggcccagaggctgggcccctggacatgtacctgcagaataataaagtcatcaatacctcaaaaaaaaaaaaaaaaaaaaa

SEQ ID NO: 85 - DNA, 1494 bp, Homo sapiens
  T10
agtgaaacagaaggggaggtgcagtttcagaacccagccagcctctctcttgctgcctagcctcctgccggcctcatcttcgcccagccaaccccgcctggagccctatggccaactgcgagttcagcccggtgtccggggacaaaccctgctgccggctctctaggagagcccaactctgtcttggcgtcagtatcctggtcctgatcctcgtcgtggtgctcgcggtggtcgtcccgaggtggcgccagcagtggagcggtccgggcaccaccaagcgctttcccgagaccgtcctggcgcgatgcgtcaagtacactgaaattcatcctgagatgagacatgtagactgccaaagtgtatgggatgctttcaagggtgcatttatttcaaaacatccttgcaacattactgaagaagactatcagccactaatgaagttgggaactcagaccgtaccttgcaacaagattcttctttggagcagaataaaagatctggcccatcagttcacacaggtccagcgggacatgttcaccctggaggacacgctgctaggctaccttgctgatgacctcacatggtgtggtgaattcaacacttccaaaataaactatcaatcttgcccagactggagaaaggactgcagcaacaaccctgtttcagtattctggaaaacggtttcccgcaggtttgcagaagctgcctgtgatgtggtccatgtgatgctcaatggatcccgcagtaaaatctttgacaaaaacagcacttttgggagtgtggaagtccataatttgcaaccagagaaggttcagacactagaggcctgggtgatacatggtggaagagaagattccagagacttatgccaggatcccaccataaaagagctggaatcgattataagcaaaaggaatattcaattttcctgcaagaatatctacagacctgacaagtttcttcagtgtgtgaaaaatcctgaggattcatcttgcacatctgagatctgagccagtcgctgtggttgttttagctccttgactccttgtggtttatgtcatcatacatgactcagcatacctgctggtgcagagctgaagattttggagggtcctccacaataaggtcaatgccagagacggaagcctttttccccaaagtcttaaaataacttatatcatcagcatacctttattgtgatctatcaatagtcaagaaaaattattgtataagattagaatgaaaattgtatgttaagttacttcactttaattctcatgtgatccttttatgttatttatatattggtaacatcctttctattgaaaaatcaccacaccaaacctctcttattagaacaggcaagtgaagaaaagtgaatgctcaagtttttcagaaagcattacatttccaaatgaatgaccttgttgcatgatgtatttttgtacccttcctacagatagtcaaaccataaacttcatggtcatgggtaaa

SEQ ID NO: 86 - DNA, 952 bp, Homo sapiens
  ELA1
ttggtccaagcaagaaggcagtggtctactccatcggcaacatgctggtcctttatggacacagcacccaggaccttccggaaaccaatgcccgcgtagtcggagggactgaggccgggaggaattcctggccctctcagatttccctccagtaccggtctggaggttcccggtatcacacctgtggagggacccttatcagacagaactgggtgatgacagctgctcactgcgtggattaccagaagactttccgcgtggtggctggagaccataacctgagccagaatgatggcactgagcagtacgtgagtgtgcagaagatcgtggtgcatccatactggaacagcgataacgtggctgccggctatgacatcgccctgctgcgcctggcccagagcgttaccctcaatagctatgtccagctgggtgttctgccccaggagggagccatcctggctaacaacagtccctgctacatcacaggctggggcaagaccaagaccaatgggcagctggcccagaccctgcagcaggcttacctgccctctgtggactacgccatctgctccagctcctcctactggggctccactgtgaagaacaccatggtgtgtgctggtggagatggagttcgctctggatgccagggtgactctgggggccccctccattgcttggtgaatggcaagtattctgtccatggagtgaccagctttgtgtccagccggggctgtaatgtctccaggaagcctacagtcttcacccaggtctctgcttacatctcctggataaataatgtcatcgcctccaactgaacattttcctgagtccaacgaccttcccaaaatggttcttagatctgcaataggacttgcgatcaaaaagtaaaacacattctgaaagactattgagccattgatagaaaagcaaataaaactagatatacatt

SEQ ID NO: 87 - DNA, 595 bp, Homo sapiens
  MLN70; S100C
gggcaaggctgggccgggaagggcgtgggttgaggagaggctccagacccgcacgccgcgcgcacagagctctcagcgccgctcccagccacagcctcccgcgcctcgctcagctccaacatggcaaaaatctccagccctacagagactgagcggtgcatcgagtccctgattgctgtcttccagaagtatgctggaaaggatggttataactacactctctccaagacagagttcctaagcttcatgaatacagaactagctgccttcacaaagaaccagaaggaccctggtgtccttgaccgcatgatgaagaaactggacaccaacagtgatggtcagctagatttctcagaatttcttaatctgattggtggcctagctatggcttgccatgactccttcctcaaggctgtcccttcccagaagcggacctgaggaccccttggccctggccttcaaacccaccccctttccttccagcctttctgtcatcatctccacagcccacccatcccctgagcacactaaccacctcatgcaggccccacctgccaatagtaataaagcaatgtcacttttttaaaacatgaaa

SEQ ID NO: 88 - DNA, 3863 bp, Homo sapiens
  F13A
atttaagagccaactgtcttgtctttcccgagtccgtttgaggaagtccccgaggcgcacagagcaagcccacgcgagggcacctctggaggggagcgcctgcaggaccttgtaaagtcaaaaatgtcagaaacttccaggaccgcctttggaggcagaagagcagttccacccaataactctaatgcagcggaagatgacctgcccacagtggagcttcagggcgtggtgccccggggcgtcaacctgcaagagtttcttaatgtcacgagcgttcacctgttcaaggagagatgggacactaacaaggtggaccaccacactgacaagtatgaaaacaacaagctgattgtccgcagagggcagtctttctatgtgcagattgacttcagtcgtccatatgaccccagaagggatctcttcagggtggaatacgtcattggtcgctacccacaggagaacaagggaacctacatcccagtgcctatagtctcagagttacaaagtggaaagtggggggccaagattgtcatgagagaggacaggtctgtgcggctgtccatccagtcttcccccaaatgtattgtggggaaattccgcatgtatgttgctgtctggactccctatggcgtacttcgaaccagtcgaaacccagaaacagacacgtacattctcttcaatccttggtgtgaagatgatgctgtgtatctggacaatgagaaagaaagagaagagtatgtcctgaatgacatcggggtaattttttatggagaggtcaatgacatcaagaccagaagctggagctatggtcagtttgaagatggcatcctggacacttgcctgtatgtgatggacagagcacaaatggacctctctggaagagggaatcccatcaaagtcagccgtgtggggtctgcaatggtgaatgccaaagatgacgaaggtgtcctcgttggatcctgggacaatatctatgcctatggcgtccccccatcggcctggactggaagcgttgacattctattggaataccggagctctgagaatccagtccggtatggccaatgctgggtttttgctggtgtctttaacacatttttacgatgccttggaataccagcaagaattgttaccaattatttctctgcccatgataatgatgccaatttgcaaatggacatcttcctggaagaagatgggaacgtgaattccaaactcaccaaggattcagtgtggaactaccactgctggaatgaagcatggatgacaaggcctgaccttcctgttggatttggaggctggcaagctgtggacagcaccccccaggaaaatagcgatggcatgtatcggtgtggccccgcctcggttcaagccatcaagcacggccatgtctgcttccaatttgatgcaccttttgtttttgcagaggtcaacagcgacctcatttacattacagctaagaaagatggcactcatgtggtggaaaatgtggatgccacccacattgggaaattaattgtgaccaaacaaattggaggagatggcatgatggatattactgatacttacaaattccaagaaggtcaagaagaagagagattggccctagaaactgccctgatgtacggagctaaaaagcccctcaacacagaaggtgtcatgaaatcaaggtccaacgttgacatggactttgaagtggaaaatgctgtgctgggaaaagacttcaagctctccatcaccttccggaacaacagccacaaccgttacaccatcacagcttatctctcagccaacatcaccttctacaccggggtcccgaaggcagaattcaagaaggagacgttcgacgtgacgctggagcccttgtccttcaagaaagaggcggtgctgatccaagccggcgagtacatgggtcagctgctggaacaagcgtccctgcacttctttgtcacagctcgcatcaatgagaccagggatgttctggccaagcaaaagtccaccgtgctaaccatccctgagatcatcatcaaggtccgtggcactcaggtagttggttctgacatgactgtgacagttgagtttaccaatcctttaaaagaaaccctgcgaaatgtctgggtacacctggatggtcctggagtaacaagaccaatgaagaagatgttccgtgaaatccggcccaactccaccgtgcagtgggaagaagtgtgccggccctgggtctctgggcatcggaagctgatagccagcatgagcagtgactccctgagacatgtgtatggcgagctggacgtgcagattcaaagacgaccttccatgtgaatgcacaggaagctgagatgaaccctggcatttggcctcttgtagtcttggctaaggaaattctaacgcaaaaatagctcttgctttgacttaggtgtgaagacccagacaggactgcagagggctccagagtggagatcccacatatttcaaaaacatgcttttccaaacccaggctattcggcaaggaagttagtttttaatctctccaccttccaaagagtgctaagcattagctttaattaagctctcatagctcataagagtaacagtcatcatttatcatcacaaatggctacatctccaaatatcagtgggctctcttaccagggagatttgctcaatacctggcctcatttaaaacaagacttcagattccccactcagccttttgggaataatagcacatgatttgggctctagaattccagtcccctttctcggggtcaggttctaccctccatgtgagaatatttttcccaggactagagcacaacataatttttatttttggcaaagccagaaaaagatctttcattttgcacctgcagccaagcaaatgcctgccaaattttagatttaccttgttagaagaggtggccccatattaacaaattgcatttgtgggaaacttaaccacctacaaggagataagaaagcaggtgcaacactcaagtctattgaataatgtagttttgtgatgcattttatagaatgtgtcacactgtggcctgatcagcaggagccaatatcccttactttaaccctttctgggatgcaatactaggaagtaaagtgaagaatttatctctttagttagtgattatatttcacccatctctcaggaatcatctcctttgcagaatgatgcaggttcaggtcccctttcagagatataataagcccaacaagttgaagaagctggcggatctagtgaccagatatatagaaggactgcagccactgattctctcttgtccttcacatcacccatgttgagacctcagcttggcactcaggtgctgaagggtaatatggactcagccttgcaaatagccagtgctagttctgacccaaccacagaggatgctgacatcatttgtattatgttccaaggctactacagagaaggctgcctgctatgtatttgcaaggctgatttatggtcagaatttccctctgatatgtctagggtgtgatttaggtcagtagactgtgattcttagcaaaaaatgaacagtgataagtatactgggggcaaaatcagaatggaatgctctggtctatataaccacatttctaagcctttgagactgttcctgagccttcagcactaacctatgagggtgagctggtcccctctatatatacatcatacttaactttactaagtaatctcacagcatttgccaagtctcccaatatccaattttaaaatgaaatgcattttgctagacagttaaactggcttaacttagtatattattattaattacaatgtaatagaagcttaaaataaagttaaactgattatatttgca

SEQ ID NO: 89 - DNA, 2531 bp, Homo sapiens
  CALB
agggagagaactctggaggaacgctgagctgagcagcaccgaggacagcgcccggcagcgcccgcgcccaggtctccctccgcagccctgactcgcgcacacgctgagcttttgctcactccccttcgcgcggacacagacacacgcatattcacacacccagacacacaccccgctgtacaatggcagaatcccacctgcagtcatccctcatcacagcctcacagtttttcgagatctggctccatttcgacgctgacggaagtggttacctggaaggaaaggagctgcagaacttgatccaggagctccagcaggcgcgaaagaaggctggattggagttatcacctgaaatgaaaacttttgtggatcagtatgggcaaagagatgatggaaaaataggaattgtagagttggctcacgtattacccacagaagagaatttcctgctgctcttccgatgccagcagctgaagtcctgtgaggaattcatgaagacatggagaaaatatgatactgaccacagtggcttcatagaaactgaggagcttaagaactttctaaaggacctgctagaaaaagcaaacaagactgttgatgacacaaaattagccgagtatacagacctaatgctgaaactatttgattcaaataatgatgggaagctggaattaactgagatggccaggttactaccagtgcaggagaattttcttcttaaattccagggaatcaaaatgtgtgggaaagagttcaataaggcttttgagctgtatgatcaggacggcaatggatacatagatgaaaatgaactggatgctttactgaaggatctgtgcgagaagaataaacaggatctggatattaataatattacaacatacaagaagaacataatggctttgtcggatggagggaagctgtaccgaacggatcttgctcttattctctgtgctggggataactagagttggtggccgcaaccacttgctagtgatacactgtatctaaaaaataactgtgcactataagggagtaggctgtattttcttttatatctgtaaatttaactgcatatagataattatccaggatgtgtggctcattcttttcagcttgtttctatactgtttgtaatatacagtttttgtaaccatatgattgaaaagaagaaagtctatgcttaggccagtcagtacacccaattttaaaaaataacatattcttgctttcacaaatatagttgaacaagatttccctaaaaattccaccaggattaatctctaaaattctagtctctgatttgcaaatgcacatttgtcactgaataatggaattatgtataacaagccaaacattcttattttagacaaccatagaactgtcccacaaaatatttctaagcttatttctaactattaggaggaatgtgcttttccatctaaaatactcaccaaaatatagttaattgtggctttatgaagttaacagtctcattacagatttagtttaccaatcaacagcatgtctactgcttggatccatacaaaactatcggttcaagttgatgtgacaagggaagggagcaccagatgacacataaatctgtctgattctatgcctgtatttccaacaaacttactgtcagagaatatgacctaaatccattttctaaactgttttcatgtgttgcaaattattctagtcaactgctgttttatgtcatactctgtgtaatctctgattaaatttaatatactgcatatcctggtgtctagtttgcatacttcctggattttctttctatgtagaactgttcatttccaccaagggtatctgctgcctctgaaaatatttttttctagctataacaactctattttttactacataattaaattttaatgtaaaattcatagcatcctgattattgaatgttatatcatcaatacttttgtgtattctgtggattctatatttcatattgagatcagcattcaaaatagttctatttctatctgcaaatagtttcaaatgagtttaaaaaaataacatctgaaaagaaatgctaatgtaatcatttatcttatctagcaagaagattctaaaacattctttaacatacatctaagtcagtttcacatatttgtagctagaatatcctatactggttatagttgatatgtaacagttggtgattttagatttctttgattgtgaaacagggagctatgagagatgtgtccatgtgaaatttacagttactgcctaggagttaatgatcgttctgggtcagcttgaatgtccccattctataaattcaacacttattttctgaattcataaaaataaccaaaaaatgtgagctataatgtttccctcaagaacaaacagaaacgagatttgccaaaaactaaaattcaacaaatgatgttgagtgggagattggctttgcctttagcgtgtaaatggaagcactgccattagactgaatttaactactaagaataaataaagaagaaaataacctt

SEQ ID NO: 90 - DNA, 1344 bp, Homo sapiens
  G0S8
aaacagccggggctccagcgggagaacgataatgcaaagtgctatgttcttggctgttcaacacgactgcagacccatggacaagagcgcaggcagtggccacaagagcgaggagaagcgagaaaagatgaaacggacccttttaaaagattggaagacccgtttgagctacttcttacaaaattcctctactcctgggaagcccaaaaccggcaaaaaaagcaaacagcaagctttcatcaagccttctcctgaggaagcacagctgtggtcagaagcatttgacgagctgctagccagcaaatatggtcttgctgcattcagggcttttttaaagtcggaattctgtgaagaaaatattgaattctggctggcctgtgaagacttcaaaaaaaccaaatcaccccaaaagctgtcctcaaaagcaaggaaaatatatactgacttcatagaaaaggaagctccaaaagagataaacatagattttcaaaccaaaactctgattgcccagaatatacaagaagctacaagtggctgctttacaactgcccagaaaagggtatacagcttgatggagaacaactcttatcctcgtttcttggagtcagaattctaccaggacttgtgtaaaaagccacaaatcaccacagagcctcatgctacatgaaatgtaaaagggagcccagaaatggaggacatttcattctttttcctgaggggaaggactgtgacctgccataaagactgaccttgaattcagcctgggtgttcaggaaacatcactcagaactattgattcaaagttgggtagtgaatcaggaagccagtaactgactaggagaagctggtatcagaacagcttccctcactgtgtacagaacgcaagaagggaataggtggtctgaacgtggtgtctcactctgaaaagcaggaatgtaagatgatgaaagagacaatgtaatactgttggtccaaaagcatttaaaatcaatagatctgggattatgtggccttaggtagctggttgtacatctttccctaaatcgatccatgttaccacatagtagttttagtttaggattcagtaacagtgaagtgtttactatgtgcaagggtattgaagttcttatgaccacagatcatcagtactgttgtctcatgtaatgctaaaactgaaatggtccgtgtttgcattgttaaaaatgatgtgtgaaatagaatgagtgctatggtgttgaaaactgcagtgtccgttatgagtgccaaaaatctgtcttgaaggcagctacactttgaagtggtctttgaatacttttaataaatttattttgataaataatattg

SEQ ID NO: 91 - DNA, 656 bp, Homo sapiens
  P27; ISG12; FAM14D
gggaacacatccaagcttaagacggtgaggtcagcttcacattctcaggaactctccttctttgggtctggctgaagttgaggatctcttactctctaggccacggaattaacccgagcaggcatggaggcctctgctctcacctcatcagcagtgaccagtgtggccaaagtggtcagggtggcctctggctctgccgtagttttgcccctggccaggattgctacagttgtgattggaggagttgtggctgtgcccatggtgctcagtgccatgggcttcactgcggcgggaatcgcctcgtcctccatagcagccaagatgatgtccgcggcggccattgccaatgggggtggagttgcctcgggcagccttgtggctactctgcagtcactgggagcaactggactctccggattgaccaagttcatcctgggctccattgggtctgccattgcggctgtcattgcgaggttctactagctccctgcccctcgccctgcagagaagagaaccatgccaggggagaaggcacccagccatcctgacccagcgaggagccaactatcccaaatatacctggggtgaaatataccaaattctgcatctccagaggaaaataagaaataaagatgaattgttgcaactcttcaaaa

SEQ ID NO: 92 - DNA, 1222 bp, Homo sapiens
  CLIP; CLIP2; WSCR4; WBSCR4; CLIP-115; KIAA0291; MGC11333
caaaatatctgcatccacctggagatgcagctaagtgggtccttatgtacacaccacgttcacacacacacagagggaccacgtgtgcacgcatgaccgtgtgggtggcggcgtttgctgtgaaccatgctcaggccacacagagacacatacttggtttctgggactgagacccaggcctggcaggaccgtgcctacagatactgcaaacgttcctacagcctagaggtgcgtatacacacccaagtacacgcagccaggcattcaggggtgtgtttgccacatggagcatcccttcctggtcttgccaggcacctgcacagagcgtctccagccccatctcctaacgggggctgggggtaagagaaatctaactgcgctcccccaacccctcgccctgccatcttcccctcaagcctgctaagttatcccaggcctgtgcgtggtggaaaaagccagccttggccctgcagcctccacctcgccgctgggggaccaacaggttgcttacagctttgcaccccggcatcagcacaggggtccctgccccaccctccggcagctcagggagtgttttcctgtgaggcctcccccatcagtggaccagagggagaagcccgatgccccatcccggctttcccgtaacgcacaggacacgtgtgcaattcataggaacggcccagatcgccctcatgagtgccacctggtacaggtaggtggcgctcacgttcctgcccaaatgcagcccatcggggagtcacagtcagtccccccggcccccctcccagtccctgttggctttcggtagctctcgcatgcagttctattaacagccgtctagaagcgatgctttagtggcctaacccagggtcaaatacagctctttctagcaaaatcaggcagctctgccccatcggtaggggcaccgattagtctactaacagccagaggtccatctaggagggtgccgggaggagctgagcccccggaggtgggctcctggtgacgggtgtccaagaagcggtttccttgggagcttctgcctccgtgggcctctcagcccgccccgtgtggccgcccgggtgtggctcagccatgtcccctccccaggtccttcattcacccctcccctccccacagtggaattgttgaagtgtggcgagtctgtgctcgggacaataaagcttgtgacaggtccaggaccccggcaaaaaaaaaaaaa

SEQ ID NO: 93 - DNA, 8747 bp, Homo sapiens
  FB22; HM89; LAP3; LCR1; NPYR; WHIM; CD184; LESTR; NPY3R; NPYRL; HSY3RR; NPYY3R; D2S201E
caattctgaatcctgccttttgcacttaatgtttcataagtatttccccatgtcactaaaaattcttccaaataacattcacgatgtccatatggaatttcagatgtggatgaaccaaaatcttgtcaactattccactaacagtggttatttagggatgttcagacatttcactatttaaaaaaaaatgtttccacaaatacctttgtggcataagtttttatgagtggagttactgttctgaagttcctgctgaatagaaaatgctttccagtgaggctgtcccaagccacattcccatcagtgacaagcgagagacagctggtcttttcaaatccggagaccaaatattatctttgaaaaaaaatggatttttgcctaatttggtagtcaccaaatagcatctcattgttcttttaattatctgcttccttttagtagagatccctaaaaagatctgaaaggagtcttcagataaaggaaggagctttcttttgtctgtctacaatcaacaaatatttattatgcaaaccattttgctccgagttttctcctctttccctttttggacagatttgggagatctcacctttcaggttttagacatcgtgcagggaggagttttgaggtagggtgcagcttacggtccaggataaaacatactgattctgccactaccaggctttgtgaaaagcaagtcatgaaaacgctctgaaattctagaccttcagtagataggatctaccgtgtctataaaaatatgaagatccttaagttttattaaagattcgaaaaaagtaaaagtgtttttacggttttattttcatttttatttcttaccgttatcgtttattataaaggatattataaaggatacagatgaagagatacgtaatgcaaggcctgtgagaaggggcgtggagcttccgaaacctcttccagccaccaccctccaagaacctggagtttctttttttttttttaattctacaaatgtaatattagaattgattttatctggccattagtgtgtgtcctaactcgttcgtttctgagagtcccatctcccggcccgggatatcatctttcctgtgtcagtgaaagtgcagagtagatgagaacctttaaccaccaacattagggaggggtcccagacaaagggggtaagtcatgctctgtagagaaaaggttccctgcctccgaactacctctggaacactccagtaaatgtttcctcttttgatatagaaaagagggatcgtgtgtagagtgcagtctgggcaatccctctcctcgggaccatttcggggtaggggcctctggggtccgtgtcgcgacgcacgcgcctcggtcccagctatctccgcagcgggccaccccgcctgcggacgcagtttctcggccccgccccacactcgctcccccgccccacccagtctccgcgccggagggaagtggcgcgagggggaaagcactgtctgcgcgcccactgcaaacctcagccagtctgagatcgctttaaacgtctgacccccacccccactccgccccgcccagttcttcaacctaatttctgattcgtgccaaagcttgtcctctgctcaaaatcgtggaagacgccgagtatggggaccgaagacctgggttcaagcccggcttggaatccctgcccatccctggcatttcatctctccgggcttatttgctggtttctccgaatgcgggccttgtctggttcacgctggatccccaacgcctagaacagtgcgtggcacgcagttcgtccttctataaatatcggactaaatgcatctctgtgatggtaatacccacacggtgttgtgagaatgaatgagtgattctgtgcaagttcctagtgatctgttacaaaaagtactggtcgctaaattactcttataataaagcatacttttaggataataaagcactattcgcgaattggttaccgctattatgaaattactgagcaatacatatctacatctgatcagtctccagaattatgccaaatcctaccttcttctgaaagtatctcctaattatctgcacctgaccctagtgatgctgtgaatgtgcaagtatagctacatcctccgaaggaaaggatctttactccttttacctcctgaatgggctgcgtctgctgaaagcgcgggggaatgggcggttggaagcttggccctacttccagcattgccgcctactggttgggttactccagcaagtcactccccttccctgggcctcagtgtctctactgtagcattcccaggtctggaattccatccactttagcaaggatggacgcgccacagagagacgcgttcctagcccgcgcttcccacctgtcttcaggcgcatcccgcttccctcaaacttaggaaatgcctctgggaggtcctgtccggctccggactcactaccgaccacccgcaaacagcagggtcccctgggcttcccaagccgcgcacctctccgccccgcccctgcgccctccttcctcgcgtctgcccctctcccccaccccgccttctccctccccgccccagcggcgcatgcgccgcgctcggagcgtgtttttataaaagtccggccgcggccagaaacttcagtttgttggctgcggcagcaggtagcaaagtgacgccgagggcctgagtgctccagtagccaccgcatctggagaaccagcggttaccatggaggggatcagtgtaagtccagtttcaacctgctttgtcataaatgtacaaacgtttgaacttagagcgcagcccctctccgagcgggcagaagcggccaggacattggaggtacccgtactccaaaaaagggtcaccgaaaggagttttcttgaccatgcctatatagtgcgggtgggtggggggggagcaggattggaatctttttctctgtgagtcgaggagaaacgactggaaagagcgttccagtggctgcatgtgtctcccccttgagtcccgccgcgcgcggcggcttgcacgctgtttgcaaacgtaagaacattctgtgcacaagtgcagagaaggcgtgcgcgctgcctcgggactcagaccaccggtctcttccttggggaagcggggatgtcttggagcgagttacattgtctgaatttagaggcggagggcggcgtgcctgggctgagttcccaggaggagattgcgcccgctttaacttcggggttaagcgcctggtgactgttcttgacactgggtgcgtgtttgttaaactctgtgcggccgacggagctgtgccagtctcccagcacagtaggcagagggcgggagaggcgggtggacccaccgcgccgatcctctgaggggatcgagtggtggcagcagctaggagttgatccgcccgcgcgctttgggtttgagggggaaaccttcccgccgtccgaagcgcgcctcttccccacggccgcgagtgggtcctgcagttcgagagtttggggtcgtgcagaggtcagcggagtggtttgacctcccctttgacaccgcgcagctgccagccctgagatttgcgctccggggataggagcgggtacggggtgaggggcgggggcggttaagaccgcacctgggctgccaggtcgccgccgcgaagactggcaggtgcaagtggggaaaccgtttggctctctccgagtccagttgtgatgtttaaccgtcggtggtttccagaaaccttttgaaaccctcttgctagggagtttttggtttcctgcagcggcgcgcaattcaaagacgctcgcggcggagccgcccagtcgctccccagcaccctgtgggacagagcctggcgtgtcgcccagcggagcccctgcagcgctgcttgcgggcggttggcgtgggtgtagtgggcagccgcggcggcccggggctggacgacccggccccccgcgtgcccaccgcctggaggcttccagctgcccacctccggccgggttaactggatcagtggcggggtaatgggaaaccacccgggagagtgaggaaatgaaacttggggcgaggaccacgggtgcagaccccgttaccttctccacccaggaaaatgccccgctccctaacgtcccaaacgcgccaagtgataaacacgaggatggcaagagacccacacaccggaggagcgcccgcttgggggaggaggtgccgtttgttcattttctgacactcccgcccaatataccccaagcaccgaagggccttcgttttaagaccgcattctctttacccactacaagttgcttgaagcccagaatggtttgtatttaggcaggcgtgggaaaattaagtttttgcgccttaggagaatgagtctttgcaacgcccccgccctccccccgtgatcctcccttctcccctcttccctccctgggcgaaaaacttcttacaaaaagttaatcactgcccctcctagcagcacccaccccaccccccacgccgcctgggagtggcctctttgtgtgtattttttttttcctcctaaggaaggttttttttcttccctctagtgggcggggcagaggagttagccaagatgtgactttgaaaccctcagcgtctcagtgcccttttgttctaaacaaagaattttgtaattggttctaccaaagaaggatataatgaagtcactatgggaaaagatggggaggagagttgtaggattctacattaattctcttgtgcccttagcccactacttcagaatttcctgaagaaagcaagcctgaattggttttttaaattgctttaaaaaatttttttaactgggttaatgcttgctgaattggaagtgaatgtccattcctttgcctcttttgcagatatacacttcagataactacaccgaggaaatgggctcaggggactatgactccatgaaggaaccctgtttccgtgaagaaaatgctaatttcaataaaatcttcctgcccaccatctactccatcatcttcttaactggcattgtgggcaatggattggtcatcctggtcatgggttaccagaagaaactgagaagcatgacggacaagtacaggctgcacctgtcagtggccgacctcctctttgtcatcacgcttcccttctgggcagttgatgccgtggcaaactggtactttgggaacttcctatgcaaggcagtccatgtcatttacacagtcaacctctacagcagtgtcctcatcctggccttcatcagtctggaccgctacctggccatcgtccacgccaccaacagtcagaggccaaggaagctgttggctgaaaaggtggtctatgttggcgtctggatccctgccctcctgctgactattcccgacttcatctttgccaacgtcagtgaggcagatgacagatatatctgtgaccgcttctaccccaatgacttgtgggtggttgtgttccagtttcagcacatcatggttggccttatcctgcctggtattgtcatcctgtcctgctattgcattatcatctccaagctgtcacactccaagggccaccagaagcgcaaggccctcaagaccacagtcatcctcatcctggctttcttcgcctgttggctgccttactacattgggatcagcatcgactccttcatcctcctggaaatcatcaagcaagggtgtgagtttgagaacactgtgcacaagtggatttccatcaccgaggccctagctttcttccactgttgtctgaaccccatcctctatgctttccttggagccaaatttaaaacctctgcccagcacgcactcacctctgtgagcagagggtccagcctcaagatcctctccaaaggaaagcgaggtggacattcatctgtttccactgagtctgagtcttcaagttttcactccagctaacacagatgtaaaagacttttttttatacgataaataacttttttttaagttacacatttttcagatataaaagactgaccaatattgtacagtttttattgcttgttggatttttgtcttgtgtttctttagtttttgtgaagtttaattgacttatttatataaattttttttgtttcatattgatgtgtgtctaggcaggacctgtggccaagttcttagttgctgtatgtctcgtggtaggactgtagaaaagggaactgaacattccagagcgtgtagtgaatcacgtaaagctagaaatgatccccagctgtttatgcatagataatctctccattcccgtggaacgtttttcctgttcttaagacgtgattttgctgtagaagatggcacttataaccaaagcccaaagtggtatagaaatgctggtttttcagttttcaggagtgggttgatttcagcacctacagtgtacagtcttgtattaagttgttaataaaagtacatgttaaacttacttagtgttatgttctgatttctgttgacattcttttggctagtagaagacaaaagtaatacatttatggtatgcaaagcactatcctaggtatttcattgtaatattttacttaccccttatcacaactctgatagattctgcttctgttactaattacattttatagaagaggaaacggaggcacagaaagcctaagtaacttggttaaaggcatgtagtaagtatcaaatcctgtattttaaaccaggtaacatgacttaacgaatctgaagccttcaccactttaaattcaaatggaagtttagaaatggccagccagcacctatttgtatgaaaggtcatctttcagaggataagcatgtataaagaagaaaaggtatgcagtcgtgtttggattttactccaccatccacttgtgaaacccaggtctgtgcaatgccagacggtgtgtgctttcctcatccagtatcctcagtgtagataaccatcactcccttttcacagacaagagaactgagattcagagactttccatacattgcactttcaagggggcaaagccaagaactaattctgtttattgttccagctcttgctcttaactcttacctactattgcccttcagaacacctgggcataagtcaactgaactgctaataaagaaagccaaaagtgaatgttttcttcataaaattaaccatgaccaaaatactcctcttgtaatatcttctatgcaaatctcaacacttttattcttaaactatcgcaacacctagcacctcctcaaggactcagccaagcagctacaagttaatactgatatttgttagagtcagaaggaaggtccactgaagcaagctccctgttgctcacattttgcacaagattttggagacttatgtaaccacccgttgctattaacacgaccattgtgcaagccccaggctcttgagtaaatttcagctttggtttctatttaaagataatttctaaactctagccatacctacctcacattggaacacaaacagggtacactccaggcatgcactcagataataagtaggatataattacgacaatatttggtctacttttagtaattgtttctggcacagaaaatccattttggaggaaaaattgcaatgccttatctttctgaggcaaatcacatttgttcaaggcaaattatagatcctgtgaagggaaataacttaattacttaaaatagaatccaatttggctgtacatttttgctgccgtctatggatctggggtaattcaaagtggtattcatattctacttgaggacacaattagatttcagataggaaattatcttgaggtttcttggttttccctgagaagcctaattggatcacccttcatttaagcatagttttacatgcactctctcaaaggcttagtcttaaagccacaaccattgagacagacttcacttgaaccctctctataaatatttattctccgggagacaatagaagaaatccttggaaggcatgctttttctttctcatcttggcttgaaacctccttaccccagattcctctcctttaccgtggagtcacaacaaaaggaactgagccaaaacaaaattcccagtgtcaccagtcttaatggatatttcattctcccttggaacaaagatggaatagctttttttccaaaagaaaaacaagccttggctctctccctgccccaaaagggtgccccccacccccatcattctctgtcccaaccctgccatgttagagcgtctccaaagccttccctgtgtcgtggtttgtctgacaatgtggggaaacccagtctgctggccagcccttgcatgaagtagctgattgttccctctcctcatcccttatgaatggggcccttgaagttcagtcatgtagattcagttgtataatgaaagctaaaatatttaaattgtatgcatgctgccaataacagcatacatctgacatctaacttattaataacattaagcctgcaactaggggggaaagtggatgttttttcttgcaaagcctttgttttcctaaaatgacacttgaaaatttatctccccctactgcaggcttcccagcccccttttataattatgcttaaattaaaataatgattctgggatactcttttggggagataccctacaggctttattttaataattgaactaagtgtttgtgactttctcctagatattgtcaaatattaaataaaggctccataaacaattgagctgtcttattcccagataatacccatttaggaggggcaaggatcc

SEQ ID NO: 94 - DNA, 1223 bp, Homo sapiens
  AD2; MGC1571; apoprotein
gggatccttgagtcctactcagccccagcggaggtgaaggacgtccttccccaggagccgactggccaatcacaggcaggaagatgaaggttctgtgggctgcgttgctggtcacattcctggcaggatgccaggccaaggtggagcaagcggtggagacagagccggagcccgagctgcgccagcagaccgagtggcagagcggccagcgctgggaactggcactgggtcgcttttgggattacctgcgctgggtgcagacactgtctgagcaggtgcaggaggagctgctcagctcccaggtcacccaggaactgagggcgctgatggacgagaccatgaaggagttgaaggcctacaaatcggaactggaggaacaactgaccccggtggcggaggagacgcgggcacggctgtccaaggagctgcaggcggcgcaggcccggctgggcgcggacatggaggacgtgtgcggccgcctggtgcagtaccgcggcgaggtgcaggccatgctcggccagagcaccgaggagctgcgggtgcgcctcgcctcccacctgcgcaagctgcgtaagcggctcctccgcgatgccgatgacctgcagaagcgcctggcagtgtaccaggccggggcccgcgagggcgccgagcgcggcctcagcgccatccgcgagcgcctggggcccctggtggaacagggccgcgtgcgggccgccactgtgggctccctggccggccagccgctacaggagcgggcccaggcctggggcgagcggctgcgcgcgcggatggaggagatgggcagccggacccgcgaccgcctggacgaggtgaaggagcaggtggcggaggtgcgcgccaagctggaggagcaggcccagcagatacgcctgcaggccgaggccttccaggcccgcctcaagagctggttcgagcccctggtggaagacatgcagcgccagtgggccgggctggtggagaaggtgcaggctgccgtgggcaccagcgccgcccctgtgcccagcgacaatcactgaacgccgaagcctgcagccatgcgaccccacgccaccccgtgcctcctgcctccgcgcagcctgcagcgggagaccctgtccccgccccagccgtcctcctggggtggaccctagtttaataaagattcaccaagtttcacgcaaaaaaaaaaaaaaaaaaaaaaaaaaaaaaaaaaaaaaaaaaaa

SEQ ID NO: 95 - DNA, 860 bp, Homo sapiens
  6-16; G1P3; FAM14C; IFI616; IFI-6-16
ccagccttcagccggagaaccgtttactcgctgctgtgcccatctatcagcaggctccgggctgaagattgcttctcttctctcctccaaggtctagtgacggagcccgcgcgcggcgccaccatgcggcagaaggcggtatcgcttttcttgtgctacctgctgctcttcacttgcagtggggtggaggcaggtgagaatgcgggtaaggatgcaggtaagaaaaagtgctcggagagctcggacagcggctccgggttctggaaggccctgaccttcatggccgtcggaggaggactcgcagtcgccgggctgcccgcgctgggcttcaccggcgccggcatcgcggccaactcggtggctgcctcgctgatgagctggtctgcgatcctgaatgggggcggcgtgcccgccggggggctagtggccacgctgcagagcctcggggctggtggcagcagcgtcgtcataggtaatattggtgccctgatgggctacgccacccacaagtatctcgatagtgaggaggatgaggagtagccagcagctcccagaacctcttcttccttcttggcctaactcttccagttaggatctagaactttgcctttttttttttttttttttttttgagatgggttctcactatattgtccaggctagagtgcagtggctattcacagatgcgaacatagtacactgcagcctccaactcctagcctcaagtgatcctcctgtctcaacctcccaagtaggattacaagcatgcgccgacgatgcccagaatccagaactttgtctatcactctccccaacaacctagatgtgaaaacagaataaacttcacccagaaaacactt

SEQ ID NO: 96 - DNA, 1102 bp, Homo sapiens
  DKFZp313K1940
actggtgacgtagatctcatgtgaccaggagtcgacgtgtgcagaagtcctggtaatctggtccttgttcccgtctggataccagcttccttcagcagcgcaggcggtggtccctgaggcccgtggaaggagtcaaacttgcgggaattttgcagtttatctgcagggctgttgtttccagcaagacccaaagctagaaaaggaggaggaagaaactgacccgatcagtgccagaagtcattgtattcaaagaagaataagcaagaaagaaaagaaggaaggaagagaggtagacagatacaagatgaaatcctgtcaaaaaatggaaggaaaaccagaaaatgagagtgaaccaaagcatgaggaagagccaaagcctgaggaaaagccagaagaggaggagaagctagaggaggaggccaaagcaaaaggaacttttagagaaaggctgattcaatctctccaggagtttaaagaagatatacacaacaggcatttaagcaatgaagatatgtttagagaagtggatgaaatagatgagataaggagagtcagaaacaaacttatagtgatgcgttggaaggttaatcgaaaccatccttacccctatttaatgtagtttaccttgatttttatctgatattaacaataccatatagcttgctttttattagcatttcctgatattcctttgtccatatttctacttataacctgttgctattaatggttttagatgtatctcttgttatctgcatctcattgtttattgtattttgaaccaatctacaagtctctgtcttttaataaaagaactttacacatttgtaaaaaagaggttcttggtaagatataaaatggaaaaaggctaagtaatatgtgaatatcatatttttgaaaggtaaaaagtacatttgtatattacatatatggacataacttgtgaaggatgaaagaaagtacagcctctcggtggtgggattatgaatgatttttctccttttgcttgtttgtattttctatattcctaaaattaacacacattattattgctagaataataaaagttttataaaaaagaagcaacaaaaaaaaaaaaaaa

SEQ ID NO: 97 - DNA, 1001 bp, Homo sapiens
  MBT; P29; ACPA; AGP7; PR-3; C-ANCA
cgtgggtgcaccctggaccccaccatggctcaccggccccccagccctgccctggcgtccgtgctgctggccttgctgctgagcggtgctgcccgagctgcggagatcgtgggcgggcacgaggcgcagccacactcccggccctacatggcctccctgcagatgcgggggaacccgggcagccacttctgcggaggcaccttgatccaccccagcttcgtgctgacggccgcgcactgcctgcgggacataccccagcgcctggtgaacgtggtgctcggagcccacaacgtgcggacgcaggagcccacccagcagcacttctcggtggctcaggtgtttctgaacaactacgacgcggagaacaaactgaacgacgttctcctcatccagctgagcagcccagccaacctcagtgcctccgtcgccacagtccagctgccacagcaggaccagccagtgccccacggcacccagtgcctggccatgggctggggccgcgtgggtgcccacgaccccccagcccaggtcctgcaggagctcaatgtcaccgtggtcaccttcttctgccggccacataacatttgcactttcgtccctcgccgcaaggccggcatctgcttcggagactcaggtggccccctgatctgtgatggcatcatccaaggaatagactccttcgtgatctggggatgtgccacccgccttttccctgacttcttcacgcgggtagccctctacgtggactggatccgttccacgctgcgccgtgtggaggccaagggccgcccctgaaccgcccctcccacagcgctggccgggaccccgagcctggctccaaaccctcgaggcggatctttggacagaagcagctcttccccgaacactgtggcgtccgggacggccccacccgtccccccacactccctcccacggggctccgggagacaggccggccctgcacctcaccccaccgtgacctcaataaacgttgaaactcc

SEQ ID NO: 98 - DNA, 2913 bp, Homo sapiens
  p63; CLIMP-63; ERGIC-63; MGC99554
gggggagcccctgcaagtttcccgggccgcgcgccgcgctcgctcgcctcccagcccgcggcccgagccgccgccgcgcccgccatgccctcggccaaacaaaggggctccaagggcggccacggcgccgcgagcccctcggagaagggtgcccacccgtcgggcggcgcggatgacgtggcgaagaagccgccgccggcgccgcagcagccgccgccgccgcccgcgccgcacccgcagcagcacccgcagcagcacccgcagaaccaggcgcacggcaagggcggccaccgcggcggcggcggcggcggcggcaagtcctcctcctcctcctccgcctccgccgccgctgccgccgccgccgcctcgtcctcggcgtcctgctcgcgcaggctcggcagggcgctcaactttctcttctacctcgccctggtggcggcggccgctttctcgggctggtgcgtccaccacgtcctggaggaggtccagcaggtccggcgcagccaccaggacttctcccggcagagggaggagctgggccagggcttgcagggcgtcgagcagaaggtgcagtctttgcaagccacatttggaacttttgagtccatcttgagaagctcccaacataaacaagacctcacagagaaagctgtgaagcaaggggagagtgaggtcagccggatcagcgaagtgctgcagaaactccagaatgagattctcaaagacctctcggatgggatccatgtggtgaaggacgcccgggagcgggacttcacgtccctggagaacacggtggaggagcggctgacggagctcaccaaatccatcaacgacaacatcgccatcttcacagaagtccagaagaggagccagaaggagatcaatgacatgaaggcaaaggttgcctccctggaagaatctgaggggaacaagcaggatttgaaagccttaaaggaagctgtgaaggagatacagacctcagccaagtccagagagtgggacatggaggccctgagaagtacccttcagactatggagtctgacatctacaccgaggttcgcgagctggtgagcctcaagcaggagcagcaggctttcaaggaggcggccgacacggagcggctcgccctgcaggccctcacggagaagcttctcaggtctgaggagtccgtctcccgcctcccggaggagatccggagactggaggaagagctccgccagctgaagtccgattcccacgggccgaaggaggacggaggcttcagacactcggaagcctttgaggcactccagcaaaagagtcagggactggactccaggctccagcacgtggaggatggggtgctctccatgcaggtggcttctgcgcgccagaccgagagcctggagtccctcctgtccaagagccaggagcacgagcagcgcctggccgccctgcaggggcgcctggaaggcctcgggtcctcagaggcagaccaggatggcctggccagcacggtgaggagcctgggcgagacccagctggtgctctacggtgacgtggaggagctgaagaggagtgtgggcgagctccccagcaccgtggaatcactccagaaggtgcaggagcaggtgcacacgctgctcagtcaggaccaagcccaggccgcccgtctgcctcctcaggacttcctggacagactttcttctctagacaacctgaaagcctcagtcagccaagtggaggcggacttgaaaatgctcaggactgctgtggacagtttggttgcatactcggtcaaaatagaaaccaacgagaacaatctggaatcagccaagggtttactagatgacctgaggaatgatctggataggttgtttgtgaaagtggagaagattcacgaaaaggtctaaatgaattgcgtgtgcagggcgcggatttaaagtccaatttctcatgaccaaaaaatgtgtggttttttcccatgtgtcccctaccccccaatttcttgtcccctcttaaagagcagttgtcaccacctgaacaccaaggcattgtattttcatgcccagttaacttatttacaatatttaagttctctgcttctgcatttggttggtttcctgaagcgcagcccctgtgaataacaggtggcttttcatggatgtctctagtcagagaaaaatgataaaggcttaaattgaggattaacagaagcagattaacctcagaaatcctgtctggctggcagatttcaagtaaaaaaaaaaaaaaggtgggttggggggacccttttctttctagttgtctttaaggaaaattaattttacttttttttttgttctggccgaaatttttatgagatatctctcacttgtcttccactttgaaccggttaaagctcatagctgtcagctctgaatgaggaggggagaagcccctgggtctttctttgaaaggaatccgctgcttgagggctgcctccctcatggtgtgcgtgtcgttctcttcctgacgcatctgtgatatcagaggtaactatgcaaagcatccaggcggttctgaatgtgaagcactacacccagcagagtcccggtgccctctgtccccactgccggcccatgtcctctctccggaggtcaccaaggaatgcacaggtttcgactaccagaaaggggagtccttgggttctttcaaaaaattcgtgaggagagctgtctacagtggaatagggggtctccctggggaatgcaggccaagtccttttattttaacatgatgtccatgaagaggtttgccgtctgggcagccctgtcggcaaggagcgtgcatactgcgtttgtgtaattgtttgctgtatctcccttccctctgagctgtattgttctttaatggctgtcttgcccttccaaaaaaaattgaaaaaaaaaaaa

SEQ ID NO: 99 - DNA, 719 bp, Homo sapiens
  LCP2
tttaaagcaaaagactattttaatcccagaagttatctcaacatgcatttgtcttttcataaaaaaattacgtaaaaatccccccaggaaaaaatactaaataagagtgaaattatatttttgaagcctcttaaattattgctgctgagaaaacgaggtttagtgattttcaaattacatgtataaaactaatgaatgcctctgactgacagaggtttggctgtaaaaaacaaatcagttttatgtgacaccaataactattactgtttcagtgttttaaaacttgccccaaattgtttctgtagctgtgtaaactactgtattttgaaatgggcattaaataatcttttaaaaaatgaattattacagtgcactactagacttcaagtggtgacatgactcatgcactttacaaacattgaagaagaataaataaattatgggatagttgacagtcttcatttcaaacactgtttttaaaggaaaggataaaacccttgtgttcatggggaggggttcagttcagtcctaagtgtttgtccattgaccaaggctgattgatctcgtgttggcaacagaggcaggaggacgggtcatttgctcggctaaacttgctatgggtaccctgcagcatgcggtaatgtgcactggtatctggaccctcggtttttcccatcaatgagcagaagtggcattttcctggagtagtcaataatatc

SEQ ID NO: 100 - DNA, 3151 bp, Homo sapiens
  KIAA1033
gtgaggccgtcgtcgccgcacgggctggttggggctgtgtctgtgggaggcgccggggtgatggcggtggagactctgtccccggactgggagtttgaccgcgttgacgacggctcgcagaaaattcatgccgaagtccaacttaagaattatgggaaatttcttgaggagtatacctctcaactgagaagaattgaggacgctctggatgactcaattggagatgtttgggatttcaatcttgatcctatagcattaaagcttttgccttatgaacagtcctctcttttggaactcataaagactgaaaacaaggtcttaaacaaagtcatcactgtttatgctgcactttgttgtgaaatcaagaaattaaaatatgaggctgaaactaaattttacaatggtctcttgttttatggagaaggagctacagatgccagcatggtggaaggtgattgccaaattcaaatggggagatttatttcattcttacaggaactgtcttgctttgttacatgaagtggtgatgaacgtagtccaccagttggctgccctctatatcagtaacaagattgcacccaaaattatagagacaactggagttcattttcagactatgtatgagcacttgggagaactgctaacagttttgctcaccctggatgaaattattgataatcatatcacactgaaagaccactggactatgtacaaaaggttactgaaatctgtccatcacaatccttcaaaatttggaattcaggaagaaaaattaaagccatttgaaaagttcttgctgaagctagaagggcaattactggatggaatgatattccaggcctgtatagaacaacaatttgattctctcaatggaggagtatctgtgtcaaaaaatagtacttttgctgaggaatttgcacatagtattcagtcaatttttgcaaatgtagaagccaaacttggagaaccttctgaaattgaccagagagacaagtatgttggaatttgtggactctttgtattgcactttcagatttttcgaactattgataaaaagttttataagtctttattggacatttgtaagaaggtaccagccatcactctaactgctaatattatttggtttcctgataattttctgatccagaaaataccagcagctgccaaactgctagacagaaaaagtcttcaagccattaaaatacacagggatacttttctacaacagaaagctcaatcacttaccaaagatgtacagtcttactacgtctttgtgagctcatggatgatgaaaatggaatctattttgtctaaagagcagagaatggataaatttgctgaggatctcaccaatagatgtaatgtttttatacagggcttcttgtatgcatatagtattagtgccattattaaaaccacaatgaatctctacatgtccatgcaaaagccaatgaccaaaacctcagttaaggcattgtgcaggcttgttgaacttctcaaggcaatagagcatatgttctacaggagaagcatggttgtggctgattcagtttcacatataacacagcaccttcaacatcagtctcttcattctatttctgtggccaagaaaagagtgatttctgacaaaaaatacagcgaacagcgtcttgatgtgctctctgctctagttttggctgaaaacactctaaatggaccaagcacaaagcaacggcgacttattgtttctttggcactaagtgttggcacacaaatgaaaaaacatttaaagatgaagaactctttccacttcaagtagtcatgaaaaaactggatcttattagtgaacttagagaacgagtccaaacacaatgtgactgttgttttttatactggcatcgagctgtcttcccaatttatttagatgatgtatatgaaaatgctgttgatgcagccagattacattacatgttcagtgctttgcgcgactgtgtacctgctatgatgcatgcaaggcatttagagtcctatgagatacttctggattgctatgacaaggaaattatggaaattttaaatgagcatttgctggacaaattatgcaaagaaatagagaaagatctgcgactttctgtgcatactcatttaaagctggatgaccgaaaccctttcaaagttggcatgaaagacctggctctttttttctctctgaatccaattcggtttttcaatcgtttcattgacattcgggcttacgtaactcactacctagacaagactttctacaatctaacaactgtagcccttcatgactgggccacttatagtgagatgagaaacttagctaatcagcgttatggactggttatgacagaggcacatcttcccagtcagactttggaacagggccttgatgttttagaaattatgagaaacattcatatatttgtgtcccgatacctctataatctcaacaatcagatttttattgaacgaacaagcaataacaagcatttgaatactattaatattcggcatattgctaattcaattcgaacacatggcacgggaattatgaatacaactgttaatttcacctaccagtttttgaaaaagaagttctatatatttagccaatttatgtatgatgaacacatcaaatccagattgattaaagatattcgatttttcagggaaattaaggaccaaaatgatcataagtatccttttgatagagcagaaaaattcaatcgaggcatcagaaaacttggaataacacctgagggacagagctaccttgatcaattcaggcaactcatcagccagattggtaatgctatgggctatgtacgaatgataagatctggtggtcttcattgtagcagcaatgccattagatttgttcctgatcttgaagatattgtaaattttgaagaactagtaaaagaagaaggtcttgcagaagaaacattaaaagcagcaaggcatttggattcagtcctcagtgatcacacacgaaattctgccgaaggcacagaatatttcaaaatgcttgtagacgtttttgctccagaatttcgaaggccaaagaatatacatctccgaaatttctatataattgttccccctctgaccctcaactttgtagagcattccattagttgcaagg

SEQ ID NO: 101 - DNA, 4108 bp, Homo sapiens
  OATPB; OATP-B; OATP2B1; SLC21A9; KIAA0880; DKFZp686E0517
gtgacccagggagacaaacacttggagatacttggggctgagtttgagcaagactccctaacctgtgtctggacaggtctgatgtcctgtgtggcccaagaagaactgaccccgtgtctggagctcccaccgttattgcatccctgctgtggctcacctgctgctgtctccaggagcccctgagaagatttgcttcctctcccctgctaagctccaggtcctgagattaaattaggggctggagctcactgcactccagcagtcatgggacccaggatagggccagcgggtgaggtaccccaggtaccagacaaggaaaccaaagccacaatgggcacagaaaacacacctggaggcaaagccagcccagaccctcaggacgtgcggccaagtgtgttccataacatcaagctgttcgttctgtgccacagcctgctgcagctggcgcagctcatgatctccggctacctaaagagctccatctccacagtggagaagcgcttcggcctctccagccagacgtcggggctgctggcctccttcaacgaggtggggaacacagccttgattgtgtttgtgagctattttggcagccgggtgcaccgaccccgaatgattggctatggggctatccttgtggccctggcgggcctgctcatgactctcccgcacttcatctcggagccataccgctacgacaacaccagccctgaggatatgccacaggacttcaaggcttccctgtgcctgcccacaacctcggccccagcctcggccccctccaatggcaactgctcaagctacacagaaacccagcatctgagtgtggtggggatcatgttcgtggcacagaccctgctgggcgtgggcggggtgcccattcagccctttggcatctcctacatcgatgactttgcccacaacagcaactcgcccctctacctcgggatcctgtttgcagtgaccatgatggggccaggcctggcctttgggctgggcagcctcatgctgcgcctttatgtggacattaaccagatgccagaaggtggtatcagcctgaccataaaggacccccgatgggtgggtgcctggtggctgggtttcctcatcgctgccggtgcagtggccctggctgccatcccctacttcttcttccccaaggaaatgcccaaggaaaaacgtgagcttcagtttcggcgaaaggtcttagcagtcacagactcacctgccaggaagggcaaggactctccctctaagcagagccctggggagtccacgaagaagcaggatggcctagtccagattgcaccaaacctgactgtgatccagttcattaaagtcttccccagggtgctgctgcagaccctacgccaccccatcttcctgctggtggtcctgtcccaggtatgcttgtcatccatggctgcgggcatggccaccttcctgcccaagttcctggagcgccagttttccatcacagcctcctacgccaacctgctcatcggctgcctctccttcccttcggtcatcgtgggcatcgtggtgggtggcgtcctggtcaagcggctccacctgggccctgtgggatgcggtgccctttgcctgctggggatgctgctgtgcctcttcttcagcctgccgctcttctttatcggctgctccagccaccagattgcgggcatcacacaccagaccagtgcccaccctgggctggagctgtctccaagctgcatggaggcctgctcctgcccattggacggctttaaccctgtctgcgaccccagcactcgtgtggaatacatcacaccctgccacgcaggctgctcaagctgggtggtccaggatgctctggacaacagccaggttttctacaccaactgcagctgcgtggtggagggcaaccccgtgctggcaggatcctgcgactcaacgtgcagccatctggtggtgcccttcctgctcctggtcagcctgggctcggccctggcctgtctcacccacacaccctccttcatgctcatcctaagaggagtgaagaaagaagacaagactttggctgtgggcatccagttcatgttcctgaggattttggcctggatgcccagccccgtgatccacggcagcgccatcgacaccacctgtgtgcactgggccctgagctgtgggcgtcgagctgtctgtcgctactacaataatgacctgctccgaaaccggttcatcggcctccagttcttcttcaaaacaggttctgtgatctgcttcgccttagttttggctgtcctgaggcagcaggacaaagaggcaaggaccaaagagagcagatccagccctgccgtagagcagcaattgctagtgtcggggccagggaagaagccagaggattcccgagtgtgagctgtcttggggccccacctggccaagagtagcagccacagcagtacctcctctgagtcctttgcccaagattgggtgtcaagagccctgtgttccattctggctcctccactaaattgctgtgtgacttcaggcaagacattgatcctctctcagcctttgcttgctagtctgaaccaaagagttgtttgggcatttgctgtgttggccatttctggagcaagagggtcttcttcctccttcccccagccagccagctgtcctggggccaggctttcctgggtggaaagaagtatacctttccctggggccctaggatagcaaagtgagccatagtgggccaggctgccctccatgctgggccccagcccaggtctgcactcgcctggatcaccttctttgagccttagccatctcctgtcaggtaggaatgaacttgccagccttcaggctcgttcagctatgaccatctgtgcggtcagggtacactcagctctcctccccaactccagcagcctttaagaagtgtccctttggcgccccctggaggcagagcactgagctggaccctgggtagactcccacagggaggacggagctggcctcaggagtgggacacccagacttggcagggccttcaagaggcctgtgtgggggccccaggaatccttagctgaagcggggagactcactctccatctcaggaaattctagcccttgccctcagggagccacggttgagggtgaggcccaacacctgccttagggccctgggtgggcaagtctgggccctggggtagggagggagactcaggcccacacttgggtattttctaatttcagacaaacacacactcagcgcgcactcactgattcctacacattgccaagatttcacacatgtgaccaggggccaccaaagtccctgtgacctttgtgactaggatcctaatttctctattttctcctgggtgcctgggtctgtgtcacctggggcagtgtggataatgtttagttctgtgacactgttttttgggggtggcacctggttctccgatgcctgggctggtgtcaggcccaggactgtagtgctgggagcagtaaagctcagctctgtgtaatgagtgatgctatggcttgctcgtgtcttatgatccaatccttttctacatcagcccttgttttgttttatggctagtcttatctggcctggttatttccttgcggggaggagagggtttgctaatctgctcccagcccaacctattaccaccccacctcgctgggacctactgctcgggaggcagcagacagggagccaccagcagtggcttcctggccctgtgctgggggtggggggaagctgggggcacatgtggcccttgccttctgagcagctcccagtgccagggctttgagactttcccacatgataaaagaaaagggaggtacagaagttccaattccctttttattttgctggttggtatctgtaaatgtttaataaatatctgagcatgtatctatcaacgccaagaatttcaaagtctccttcaacaatatgaggcttttaggatgtttatattccttcatccctcttgtttcccaggttttgcagggaaaaaaagtctggaattatagatacagcttattattaaatttgttcttgcataaaaaaaaaaaaaaaaaaaaaaaaaaaaaaaaaaaaaaaaaa

SEQ ID NO: 102 - DNA, 2711 bp, Homo sapiens
  NRAGE; DLXIN-1
ggcacgaggagagtgcggctgctgagagccgagcccagcaatcccgatcctctgagtcgtgaagaagggaggcagcgagggggttggggttggggcctgagaagcccccaggctccgctcttgccagagggacaggagccatggcccagaaaatggactgtggtgcgggcctcctcggcttccaggctgaggcctccgtagaagacagcgccttgcttatgcagaccttgatggaggccatccagatctcagaggctccacctactaaccaggccaccgcagctgctagtccccagagttcacagcccccaactgccaatgagatggctgacattcaggtttcagcagctgccgctaggcctaagtcagcctttaaagtccagaatgccaccacaaaaggcccaaatggtgtctatgatttctctcaggctcataatgccaaggatgtgcccaacacgcagcccaaggcagcctttaagtcccaaaatgctacctccaaaggtccaaatgctgcctatgatttttcccaggcagcaaccactggtgagttagctgctaacaagtctgagatggccttcaaggcccagaatgccactactaaagtgggcccaaatgccacctacaatttctctcagtctctcaatgccaatgacctggccaacagcaggcctaagacccctttcaaggcttggaatgataccactaaggccccaacagctgatacccagacccagaatgtaaatcaggccaaaatggccacttcccaggctgacatagagaccgacccaggtatctctgaacctgacggtgcaactgcacagacatcagcagatggttcccaggctcagaatctggagtcccggacaataattcggggcaagaggacccgcaagattaataacttgaatgttgaagagaacagcagtggggatcagaggcgggccccactggctgcagggacctggaggtctgcaccagttccagtgaccactcagaacccacctggcgcaccccccaatgtgctctggcagacgccattggcttggcagaacccctcaggctggcaaaaccagacagccaggcagaccccaccagcacgtcagagccctccagctaggcagaccccaccagcctggcagaacccagtcgcttggcagaacccagtgatttggccaaacccagtaatctggcagaacccagtgatctggccaaaccccattgtctggcccggccctgttgtctggccgaatccactggcctggcagaatccacctggatggcagactccacctggatggcagaccccaccgggctggcagggtcctccagactggcaaggtcctcctgactggccgctaccacccgactggccactgccacctgattggccacttcccactgactggccactaccacctgactggatccccgctgattggccaattccacctgactggcagaacctgcgcccctcgcctaacctgcgcccttctcccaactcgcgtgcctcacagaacccaggtgctgcacagccccgagatgtggcccttcttcaggaaagagcaaataagttggtcaagtacttgatgcttaaggactacacaaaggtgcccatcaagcgctcagaaatgctgagagatatcatccgtgaatacactgatgtttatccagaaatcattgaacgtgcatgctttgtcctagagaagaaatttgggattcaactgaaagaaattgacaaagaagaacacctgtatattctcatcagtacccccgagtccctggctggcatactgggaacgaccaaagacacacccaagctcggtctcctcttggtgattctgggtgtcatcttcatgaatggcaaccgtgccagtgaggctgtcctctgggaggcactacgcaagatgggactgcgtcctggggtgagacatcccctccttggagatctaaggaaacttctcacctatgagtttgtaaagcagaaatacctggactacagacgagtgcccaacagcaaccccccggagtatgagttcctctggggcctccgttcctaccatgagactagcaagatgaaagtgctgagattcattgcagaggttcagaaaagagaccctcgtgactggactgcacagttcatggaggctgcagatgaggccttggatgctctggatgctgctgcagctgaggccgaagcccgggctgaagcaagaacccgcatgggaattggagatgaggctgtgtctgggccctggagctgggatgacattgagtttgagctgctgacctgggatgaggaaggagattttggagatccctggtccagaattccatttaccttctgggccagataccaccagaatgcccgctccagattccctcagacctttgccggtcccattattggtcctggtggtacagccagtgccaacttcgctgccaactttggtgccattggtttcttctgggttgagtgagatgttggatattgctatcaatcgcagtagtctttcccctgtgtgagctgaagcctcagattccttctaaacacagctatctagagagccacatcctgttgactgaaagtggcatgcaagataaatttatttgctgttccttgtctactgctttttttccccttgtgtgctgtcaagttttggtatcagaaataaacattgaaattgcaaagtgaaaaaaaaaaaaaaaaaaaa

SEQ ID NO: 103 - DNA, 1595 bp, Homo sapiens
  MALT1
gttaaagctagatagaggttaagaatcaagatataatggataattttcatagctgcctatcagaatttcccaaatatttagcatcttccttgataatatgtattttcttcttgaatttcactggcctaatgagataatactcttatctttggctctacctaaaagttggttaaaaatgcaattggcattaacaaggaaaaatactgaattagtaattttaaaagtctcacaaagaaaatcccaggcctagatggctgcattgttgaattctgccaaacattaaaattagcactaattttttgcacactgtttctaaaagtaggagaggaaagaacacttcccaacttactctaggtcagtattaccctgatactagactagacatcacaagaaaactataagccaatattccttattaatacaaacacaaaaatcattaacaaaaatattagcaaactgaatccagcaacctataaaaaggattctatatcatgaccaagtggaatttatcccaggaattcaaggttggttcaacatctaaaaatcaaataagctaatatacagtcagttctcattattcacagtaattatgttctacagaatattctcccataaacactgaattaaatatggaacaactgcttttaggagaaagtgtatttgtgtgtatgtgtgtatacatatgtttatctcacacacattatgagcttgaattcttaattcatcctagcaaattctaccttattttacagaagtgaaagtgaggtatcagaagtgttaagtgacatgcctgaggcacccccctaacaggtgtcagagctgaaattcaaaccccatccagctggccccggagccagagcttcttgtactacacagaattgcccctgccacttccaccctccagtcatttctctatgagactgaagcaggaaggcagagcatcatcttgttcagcctcagctgggaacatgtgtactgggtgactcaaatttttcacccatttacacatatccacaaatgactgcaaaagtgccacggatatcaatttgagggttataaattttagcaagttggtaaattcacaaatacataaccttgaataatgaggatcaactgtaccatatttaataaagcacaaaacccacacagattgtcttattacagcatttgataaaatccaaaactctttcataaaaacactcaacaaacttaggaataaaaggaatcttcctagatatgataaatataacatctatgaaaagcccacacctaacattatacttcatggtgatagactgaaggctgaatgttttccccttaagattgggaagaaggacaaggatgttcactcggcactacttctattcagcattgtacttgaagttctagccacagcagttaggttaggaattcaaggtttgttcaacatctaaaaatcaaataagctaataaagaaaagaggtttatactgcaaaagaagtgaaactatatgtattcacagttgatacatagttgtatatagaaaatgctaaagaatccataaaaagtaataaatgagttcaacaggtaaaaaaaaaaaaaaaaaaaaaaaaaaa

SEQ ID NO: 104 - DNA, 1711 bp, Homo sapiens
  ISYNA1
gggagtcttacaggggcggagcttaaggtgccggaggtctcaggggaggggcctgggggcagcggcttccgtcctggctgtgagcctggaactgaaaaatgcccgaaagtggggcggggcttgagagtctaggtggggcccaggccgggtcgcggccctttcaccactcccacccgtcacctcgccgtgtctgctgacccccaggaggccaactactacggctcgctgactcaggcgggcaccgtgagcctgggcctggacgccgagggccaggaggtgttcgtacccttcagcgcggtgctgcccatggtggcgcccaacgacctcgtgttcgatggctgggacatctcgtcgctgaacctggccgaggcgatgcggcgcgcgaaggtgctggactgggggctgcaggagcaactgtggccgcacatggaggccctgcggccccggccttctgtttacatccccgaattcatcgcggccaaccagagcgcgcgcgcggacaacctcatcccaggctcgcgtgcgcagcagctggagcagatccgcagggacatccgagacttccggtctagcgcggggctggacaaagtcatagtgctgtggacggcgaacacggagcgcttctgtgaggtgattccaggcctcaacgacacagccgagaacctgctgcgcaccattgagctcggtctggaggtgtcgccctccacgctcttcgccgtggccagcatcctggagggctgtgccttcctcaatgggtctccgcagaacaccctggtgcccggagctcttgagctcgcgtggcagcaccgggtttttgtgggcggagatgacttcaagtcaggccagaccaaagtcaagtccgtgcttgtggacttcctcattggctccggcctcaagaccatgtccatcgtgagttacaaccacctgggcaacaacgatggggagaacctatcggcgccattgcagttccgctctaaggaggtgtccaagagcaacgtggtggacgacatggtgcagagcaacccagtgctctatacgcccggcgaagagcctgaccactgcgtggtcatcaagtatgtgccgtacgtgggtgacagcaagcgcgcgctggatgagtatacctcggagctgatgctgggcggaaccaacacactggtgctgcacaacacgtgtgaggactcgctgctggccgcacccatcatgctggacctagcgctgctgaccgagctgtgccagcgcgtgagcttctgcactgacatggaccccgagccgcagaccttccaccccgtgctgtccctgctcagcttcctcttcaaggcgccactagtgccgcccggcagcccggtggtcaatgcgcttttccgccagcgcagctgcatcgagaacatcctcagggcctgcgtggggctcccgccacagaaccacatgctcctggaacacaaaatggagcgcccagggcccagcctcaagcgagttggacccgtggctgccacctaccctatgttgaacaagaaaggaccggtacccgctgccaccaatggctgcaccggtgatgccaatgggcatctgcaagaggagcccccaatgcccaccacctgaggccccggtcacacagtttctcggctcttcctccccgctgccccccacgaccctaccttgaaggcccccacaaataaaggcgctgccactcaaaaaaaaaaaaaaaaaaaaa

SEQ ID NO: 105 - DNA, 1421 bp, Homo sapiens
  TCRGC2; TRGC2(2X); TRGC2(3X); T-cell receptor, gamma, constant region C2
ggcatgcggtgggccctactggtgcttctagctttcctgtctcctgccagtcagaaatcttccaacttggaagggagaacgaagtcagtcaccaggcagactgggtcatctgctgaaatcacttgcgatcttactgtaacaaataccttctacatccactggtacctacaccaggaggggaaggccccacagcgtcttctgtactatgacgtctccactgcaagggatgtgttggaatcaggactcagtccaggaaagtattatactcatacacccaggaggtggagctggatattgagactgcaaaatctaattgaaaatgattctggggtctattactgtgccacctgggacaggcaaaaattattataagaaactctttggcagtggaacaacacttgttgtcacagataaacaacttgatgcagatgtttcccccaagcccactatttttcttccttcaattgctgaaacaaaactccagaaggctggaacatacctttgtcttcttgagaaatttttcccagatattattaagatacattggcaagaaaagaagagcaacacgattctgggatcccaggaggggaacaccatgaagactaacgacacatacatgaaatttagctggttaacggtgccagaagagtcactggacaaagaacacagatgtatcgtcagacatgagaataataaaaacggaattgatcaagaaattatctttcctccaataaagacagatgtcaccacagtggatcccaaagacagttattcaaaagatgcaaatgatgtcatcacaatggatcccaaagacaattggtcaaaagatgcaaatgatacactactgctgcagctcacaaacacctctgcatattacatgtacctcctcctgctcctcaagagtgtggtctattttgccatcatcacctgctgtctgcttggaagaacggctttctgctgcaatggagagaaatcataacagacggtggcacaaggaggccatcttttcctcatcggttattgtccctagaagcgtcttctgaggatctagttgggctttctttctgggtttgggccatttcagttctcatgtgtgtactattctatcattattgtataatggttttcaaaccagtgggcacacagagaacctcagtctgtaataacaatgaggaatagccatggcgatctccagcaccaatctctccatgttttccacagctcctccagccaacccaaatagcgcctgctatagtgtagacagcctgcggcttctagccttgtccctctcttagtgttctttaatcagataactgcctggaagcctttcattttacacgccctgaagcagtcttctttgctagttgaattatgtggtgtgtttttccgtaataagcaaaataaatttaaaaaaatgaaaa

SEQ ID NO: 106 - DNA, 5029 bp, Homo sapiens
  MLT; MLT1; DKFZp434L132
cgaggctccgtgccccgccccccgggtgccccgcccctttgcgcggctggcgcggccagccggccaggctcccctcggcaaacctgtctaattggggcggggagcggagcttcctcctctgagggccgtgccgcgctgccagatttgttcttccgcccctgcctccgcggctcggaggcgagcggaaggtgccccggggccgaggcccgtgacggggcgggcgggagccccggcagtccggggtcgccggcgagggccatgtcgctgttgggggacccgctacaggccctgccgccctcggccgcccccacggggccgctgctcgcccctccggccggcgcgaccctcaaccgcctgcgggagccgctgctgcggaggctcagcgagctcctggatcaggcgcccgagggccggggctggaggagactggcggagctggcggggagtcgcgggcgcctccgcctcagttgcctagacctggagcagtgttctcttaaggtactggagcctgaaggaagccccagcctgtgtctgctgaagttaatgggtgaaaaaggttgcacagtcacagaattgagtgatttcctgcaggctatggaacacactgaagttcttcagcttctcagccccccaggaataaagattactgtaaacccagagtcaaaggcagtcttggctggacagtttgtgaaactgtgttgccgggcaactggacatccttttgttcaatatcagtggttcaaaatgaataaagagattccaaatggaaatacatcagagcttatttttaatgcagtgcatgtaaaagatgcaggcttttatgtctgtcgagttaataacaatttcacctttgaattcagccagtggtcacagctggatgtttgcgacatcccagagagcttccagagaagtgttgatggcgtctctgaatccaagttgcaaatctgtgttgaaccaacttcccaaaagctgatgccaggcagcacattggttttacagtgtgttgctgttggaagccctattcctcactaccagtggttcaaaaatgaattaccattaacacatgagaccaaaaagctatacatggtgccttatgtggatttggaacaccaaggaacctactggtgtcatgtatataatgatcgagacagtcaagatagcaagaaggtagaaatcatcataggaagaacagatgaggcagtggagtgcactgaagatgaattaaataatcttggtcatcctgataataaagagcaaacaactgaccagcctttggcgaaggacaaggttgcccttttgataggaaatatgaattaccgggagcaccccaagctcaaagctcctttggtggatgtgtacgaattgactaacttactgagacagctggacttcaaagtggtttcactgttggatcttactgaatatgagatgcgtaatgctgtggatgagtttttactccttttagacaagggagtatatgggttattatattatgcaggacatggttatgaaaattttgggaacagcttcatggtccccgttgatgctccaaatccatataggtctgaaaattgtctgtgtgtacaaaatatactgaaattgatgcaagaaaaagaaactggacttaatgtgttcttattggatatgtgtaggaaaagaaatgactacgatgataccattccaatcttggatgcactaaaagtcaccgccaatattgtgtttggatatgccacgtgtcaaggagcagaagcttttgaaatccagcattctggattggcaaatggaatctttatgaaatttttaaaagacagattattagaagataagaaaatcactgtgttactggatgaagttgcagaagatatgggtaagtgtcaccttaccaaaggcaaacaggctctagagattcgaagtagtttatctgagaagagagcacttactgatccaatacagggaacagaatattctgctgaatctcttgtgcggaatctacagtgggccaaggctcatgaacttccagaaagtatgtgtcttaagtttgactgtggtgttcagattcaattaggatttgcagctgagttttccaatgtcatgatcatctatacaagtatagtttacaaaccaccggagataataatgtgtgatgcctacgttactgattttccacttgatctagatattgatccaaaagatgcaaataaaggcacacctgaagaaactggcagctacttggtatcaaaggatcttcccaagcattgcctctataccagactcagttcactgcaaaaattaaaggaacatctagtcttcacagtatgtttatcatatcagtactcaggattggaagatactgtagaggacaagcaggaagtgaatgttgggaaacctctcattgctaaattagacatgcatcgaggtttgggaaggaagacttgctttcaaacttgtcttatgtctaatggtccttaccagagttctgcagccacctcaggaggagcagggcattatcactcattgcaagacccattccatggtgtttaccattcacatcctggtaatccaagtaatgttacaccagcagatagctgtcattgcagccggactccagatgcatttatttcaagtttcgctcaccatgcttcatgtcattttagtagaagtaatgtgccagtagagacaactgatgaaataccatttagtttctctgacaggctcagaatttctgaaaaatgacctccttgtttttgaaagttagcataattttagatgcctgtgaaatagtactgcacttacataaagtgagacattgtgaaaaggcaaatttgtatatgtagagaaagaatagtagtaactgtttcatagcaaacttcaggactttgagatgttgaaattacattatttaattacagacttcctctttctaagattttgtgaattggttgaatagttctatacaaatgaagtatggaggtgtgtatgtttatatgtatataacaaaatattttcattgtgaccactctgaagtaagagcaatgggaatggcattattgtagaataagtcattgtatttttaacaccagaaagaaccttgccgatcaccaggcataacctaattttatccatggaagaaacacagaaaggcatctaagttagagctggcaccagaactgagacctccagaaatctattccagtattttttccactacacaactgccttcctgacaggttctgagataagtgttatgtttgtagatagagtgaaatatatttatatatatataaatatatacagatacatatctgtgtattatctcaaggaatgtacaaactttagtttttgattataaggacttcactgcaagttttagttaagaggtttgtatataaatctgttatagaacaggctgaaatttcttgttcataagattatgaaaccacatgagaagtgataaaatgtttgttaaagctagatagaggttaagaatcaagatataatggataattttcatagctgcctatcagaatttcccaaatatttagcatcttccttgataatatgtattttcttcttgaatttcactggcctaatgagataatactcttatctttggctctacctaaaagttggttaaaaatgcaattggcattaacaaggaaaaatactgaattagtaattttaaaagtctcacaaagaaaatcccaggcctagatggctgcattgttgaattctgccaaacattaaaattagcactaattttttgcacactgtttctaaaagtaggagaggaaagaacacttcccaacttactctaggtcagtattaccctgatactagactagacatcacaagaaaactataagccaatattccttattaatacaaacacaaaaatcattaacaaaaatattagcaaactgaatccagcaacctataaaaaggattctatatcatgaccaagtggaatttatcccaggaattcaaggttggttcaacatctaaaaatcaaataagctaatatacagtcagttctcattattcacagtaattatgttctacagaatattctcccataaacactgaattaaatatggaacaactgcttttaggagaaagtgtatttgtgtatatgtgtgtatacatatgtttatctcacacacattatgagcttgaattcttaattcatcctagcaaattctaccttattttacagaagtgaaagtgaggtatcagaagtgttaagtgacatgcctgaggcacccccctaacaggtgtcagagctgaaattcaaaccccatccagctggccccggagccagagcttcttgtactacacagaattgcccctgccatttccaccctccagtcatttctctatgagactgaagcaggaaggcagagcatcatcttgttcagcctcagctgggaacatgtgtactgggtgactcaaatttttcacccatttacacatatccacaaatgactgcaaaagtgccacggatatcaatttgagggttataaattttagcaagttggtaaattcacaaatacataaccttgaataatgaggatcaactgtaccatatttaataaagcacaaaacccacacagattgtcttattacagcatttgataaaatccaaaactctttcataaaaacactcaacaaacttaggaataaaaggaatcttcctagatatgataaatataacatctatgaaaagcccacacctaacattatacttcatggtgatagactgaaggctgaatgttttccccttaagattgggaagaaggacaaggatgttcactcggcactacttctattcagcattgtacttgaagttctagccacagcagttaggttaggaattcaaggtttgttcaacatctaaaaatcaaataagctaataaagaaaagaggtttatactgcaaaagaagtgaaactatatgtattcacagttgatacatagttgtatatagaaaatgctaaagaatccataaaaagtaataaatgagttcaacaggt

SEQ ID NO: 107 - DNA, 3868 bp, Homo sapiens
  CDF; HILDA; D-FACTOR
atgaacctctgaaaactgccggcatctgaggtttcctccaaggccctctgaagtgcagcccataatgaaggtcttggcggcaggagttgtgcccctgctgttggttctgcactggaaacatggggcggggagccccctccccatcacccctgtcaacgccacctgtgccatacgccacccatgtcacaacaacctcatgaaccagatcaggagccaactggcacagctcaatggcagtgccaatgccctctttattctctattacacagcccagggggagccgttccccaacaacctggacaagctatgtggccccaacgtgacggacttcccgcccttccacgccaacggcacggagaaggccaagctggtggagctgtaccgcatagtcgtgtaccttggcacctccctgggcaacatcacccgggaccagaagatcctcaaccccagtgccctcagcctccacagcaagctcaacgccaccgccgacatcctgcgaggcctccttagcaacgtgctgtgccgcctgtgcagcaagtaccacgtgggccatgtggacgtgacctacggccctgacacctcgggtaaggatgtcttccagaagaagaagctgggctgtcaactcctggggaagtataagcagatcatcgccgtgttggcccaggccttctagcaggaggtcttgaagtgtgctgtgaaccgagggatctcaggagttgggtccagatgtgggggcctgtccaagggtggctggggcccagggcatcgctaaacccaaatgggggctgctggcagaccccgagggtgcctggccagtccactccactctgggctgggctgtgatgaagctgagcagagtggaaacttccatagggagggagctagaagaaggtgccccttcctctgggagattgtggactggggagcgtgggctggacttctgcctctacttgtccctttggccccttgctcactttgtgcagtgaacaaactacacaagtcatctacaagagccctgaccacagggtgagacagcagggcccaggggagtggaccagcccccagcaaattatcaccatctgtgcctttgctgccccttaggttgggacttaggtgggccagaggggctaggatcccaaaggactccttgtcccctagaagtttgatgagtggaagatagagaggggcctctgggatggaaggctgtcttcttttgaggatgatcagagaacttgggcataggaacaatctggcagaagtttccagaaggaggtcacttggcattcaggctcttggggaggcagagaagccaccttcaggcctgggaaggaagacactgggaggaggagaggcctggaaagctttggtaggttcttcgttctcttccccgtgatcttccctgcagcctgggatggccagggtctgatggctggacctgcagcaggggtttgtggaggtgggtagggcaggggcaggttgctaagtcaggtgcagaggttctgagggacccaggctcttcctctgggtaaaggtctgtaagaaggggctggggtagctcagagtagcagctcacatctgaggccctgggaggtcttgtgaggtcacacagaggtacttgagggggactggaggccgtctctggtccccagggcaagggaacagcagaacttagggtcagggtctcagggaaccctgagctccaagcgtgctgtgcgtctgacctggcatgatttctatttattatgatatcctatttatattaacttattggtgctttcagtggccaagttaattcccctttccctggtccctactcaacaaaatatgatgatggctcccgacacaagcgccagggccagggcttagcagggcctggtctggaagtcgacaatgttacaagtggaataagcttacgggtgaagctcagagaagggtcggatctgagagaatggggaggcctgagtgggagtggggggccttgctccacccccatcccctactgtgacttgctttagcgtgtcagggtccaggctgcaggggctgggccaatttgtggagaggccgggtgcctttctgtcttgcttccagggggctggttcacactgttcttgggcgccccagcattgtgttgtgaggcgcactgttcctggcagatattgtgccccctggagcagtgggcaagacagtccttgtggcccaccctgtccttgtttctgtgtccccatgctgcctctgaaatagcgccctggaacaaccctgcccctgcacccagcatgctccgacacagcagggaagctcctcctgtggcccggacacccatagacggtgcggggggcctggctgggccagaccccaggaaggtggggtagactggggggatcagctgcccattgctcccaagaggaggagagggaggctgcagacgcctgggactcagaccaggaagctgtgggccctcctgctccacccccatcccactcccacccatgtctgggctcccaggcagggaacccgatctcttcctttgtgctggggccaggcgagtggagaaacgccctccagtctgagagcaggggagggaaggaggcagcagagttggggcagctgctcagagcagtgttctggcttcttctcaaaccctgagcgggctgccggcctccaagttcctccgacaagatgatggtactaattatggtacttttcactcactttgcacctttccctgtcgctctctaagcactttacctggatggcgcgtgggcagtgtgcaggcaggtcctgaggcctggggttggggtggagggtgcggcccggagttgtccatctgtccatcccaacagcaagacgaggatgtggctgttgagatgtgggccacactcacccttgtccaggatgcagggactgccttctccttcctgcttcatccggcttagcttggggctggctgcattcccccaggatgggcttcgagaaagacaaacttgtctggaaaccagagttgctgattccacccggggggcccggctgactcgcccatcacctcatctccctgtggacttgggagctctgtgccaggcccaccttgcggccctggctctgagtcgctctcccacccagcctggacttggccccatgggacccatcctcagtgctccctccagatcccgtccggcagcttggcgtccaccctgcacagcatcactgaatcacagagcctttgcgtgaaacagctctgccaggccgggagctgggtttctcttccctttttatctgctggtgtggaccacacctgggcctggccggaggaagagagagtttaccaagagagatgtctccgggcccttatttattatttaaacatttttttaaaaagcactgctagtttacttgtctctcctccccatcgtccccatcgtcctccttgtccctgacttggggcacttccaccctgacccagccagtccagctctgccttgccggctctccagagtagacatagtgtgtggggttggagctctggcacccggggaggtagcatttccctgcagatggtacagatgttcctgccttagagtcatctctagttccccacctcaatcccggcatccagccttcagtcccgcccacgtgctagctccgtgggcccaccgtgcggccttagaggtttccctccttcctttccactgaaaagcacatggccttgggtgacaaattcctctttgatgaatgtaccctgtggggatgtttcatactgacagattatttttatttattcaatgtcatatttaaaatatttattttttataccaaatgaatcacttttttttttaagaaaaaaaagagaaatgaataaagaatctactcttcg

SEQ ID NO: 108 - DNA, 747 bp, Homo sapiens
  ETS2
  modified_base (720)..(720): a, c, t or g
aagccaaaagacaatacaaatctgtgcttcctatttcaacacatcaatttcagcaacgactgcttcttttcagaaaccgcataagcatcgtcaaattatttgaattaatagaaggatttttctaaggggtgtggtttcaacttaataccatgatttcttgtaccacttctgccatgcttaaaatgtccggccaaatcaaacaagcagactcactaggctgaagtttgatgacctttagaatactgcagaaaggactgtgctgagttttgcctctttgggtcatatcagacaaataacctcaataatgatatacaaaggaaaatgtaatatgccagagacgtacatcatcattatgcaagacgctaaactttgaggaggccaattttaaaatcatgcttctgaaacatgtttactacataatactgaaaacaatcaaatcttgctgtcatatttggagaagacaagtgggagattaccagtttgtgctactaaagaatgttcccaaaaggaatgatgatagaagctacataaaatgtttatgcagcagagagggcgctttcatttttcatctgggttttggtttaacataagtaggcctgcttgttctctgagccagtaacaggctacctacaatttcacgggcgcttgcctttctgataggagcttgtaccgttgggtctgtcttgctcttctctctcaattcagattttaaacaagttnccaataacccaagaaacttcttggtag

SEQ ID NO: 109 - DNA, 13493 bp, Homo sapiens
  CHS; CHS1
gcggcggcggcagcggcgtcggctcggggttctccgggagagggggagtgcgcggcggccgcagctgccacaaaccaggtgaagctttgttctaagaatatttgtttcatctagtttatgagtccaaatgatatagactgtaaatgtcacagcagtggtgaaagactgctcggtcatgagcaccgacagtaactcactggcacgtgaatttctgaccgatgtcaaccggctttgcaatgcagtggtccagagggtggaggccagggaggaagaagaggaggagacgcacatggcaacccttggacagtaccttgtccatggtcgaggatttctattacttaccaagctaaattctataattgatcaggcattgacatgtagagaagaactcctgactcttcttctgtctctccttccactggtatggaagatacctgtccaagaagaaaaggcaacagattttaacctaccgctctcagcagatataatcctgaccaaagaaaagaactcaagttcacaaagatccactcaggaaaaattacatttagaaggaagtgccctgtctagtcaggtttctgcaaaagtaaatgtttttcgaaaaagcagacgacagcgtaaaattacccatcgctattctgtaagagatgcaagaaagacacagctctccacctcagattcagaagccaattcagatgaaaaaggcatagcaatgaataagcatagaaggccccatctgctgcatcattttttaacatcgtttcctaaacaagaccaccccaaagctaaacttgaccgcttagcaaccaaagaacagactcctccagatgctatggctttggaaaattccagagagattattccaagacaggggtcaaacactgacattttaagtgagccagctgccttgtctgttatcagtaacatgaacaattctccatttgacttatgtcatgttttgttatctttattagaaaaagtttgtaagtttgacgttaccttgaatcataattctcctttagcagccagtgtagtgcccacactaactgaattcctagcaggctttggggactgctgcagtctgagcgacaacttggagagtcgagtagtttctgcaggttggaccgaagaaccggtggctttgattcaaaggatgctctttcgaacagtgttgcatcttctgtcagtagatgttagtactgcagagatgatgccagaaaatcttaggaaaaatttaactgaattgcttagagcagctttaaaaattagaatatgcctagaaaagcagcctgacccttttgcaccaagacaaaagaaaacactgcaggaggttcaggaagattttgtgttttcaaagtatcgtcatagagcccttcttttacctgagcttttggaaggagttcttcagattctgatctgttgtcttcaaagtgcagcttcaaatcccttctacttcagtcaagccatggatttggttcaagaattcattcagcatcatggatttaatttatttgaaacagcagttcttcaaatggaatggctggttttaagagatggagttcctcccgaggcctcagagcatttgaaagccctaataaatagtgtgatgaaaataatgagcactgtcaaaaaagtgaaatcagagcaacttcatcattcgatgtgtacaagaaaaaggcacagacgatgtgaatattctcattttatgcatcatcaccgagatctctcaggtcttctggtttcggcttttaaaaaccaggtttccaaaaacccatttgaagagactgcagatggagatgtttattatcctgagcggtgctgttgcattgcagtgtgtgcccatcagtgcttgcgcttactacagcaggcttccttgagcagcacttgtgtccagatcctatcgggtgttcataacattggaatatgctgttgtatggatcccaaatctgtaatcattcctttgctccatgcttttaaattgccagcactgaaaaattttcagcagcatatattgaatatccttaacaaacttattttggatcagttaggaggagcagagatatcaccaaaaattaaaaaagcagcttgtaatatttgtactgttgactctgaccaactagcccaattagaagagacactgcagggaaacttatgtgatgctgaactctcctcaagtttatccagtccttcttacagatttcaagggatcctgcccagcagtggatctgaagatttgttgtggaaatgggatgctttaaaggcttatcagaactttgtttttgaagaagacagattacatagtatacagattgcaaatcacatttgcaatttaatccagaaaggcaatatagttgttcagtggaaattatataattacatatttaatcctgtgctccaaagaggagttgaattagcacatcattgtcaacacctaagcgttacttcagctcaaagtcatgtatgtagccatcataaccagtgcttgcctcaggacgtgcttcagatttatgtaaaaactctgcctatcctgcttaaatccagggtaataagagatttgtttttgagttgtaatggagtaagtcaaataatcgaattaaattgcttaaatggtattcgaagtcattctctaaaagcatttgaaactctgataatcagcctaggggagcaacagaaagatgcctcagttccagatattgatgggatagacattgaacagaaggagttgtcctctgtacatgtgggtacttcttttcatcatcagcaagcttattcagattctcctcagagtctcagcaaattttatgctggcctcaaagaagcttatccaaagagacggaagactgttaaccaagatgttcatatcaacacaataaacctattcctctgtgtggcttttttatgcgtaagtaaagaagcagagtctgacagggagtcggccaatgactcagaagatacttctggctatgacagcacagccagcgagcctttaagtcatatgctgccatgtatatctctcgagagccttgtcttgccttctcctgaacatatgcaccaagcagcagacatttggtctatgtgtcgttggatctacatgttgagttcagtgttccagaaacagttttataggcttggtggtttccgagtatgccataagttaatatttatgataatacagaaactgttcagaagtcacaaagaggagcaaggaaaaaaggagggagatacaagtgtaaatgaaaaccaggatttaaacagaatttctcaacctaagagaactatgaaggaagatttattatctttggctataaaaagtgaccccataccatcagaactaggtagtctaaaaaagagtgctgacagtttaggtaaattagagttacagcatatttcttccataaatgtggaagaagtttcagctactgaagccgctcccgaggaagcaaagctatttacaagtcaagaaagtgagacctcacttcaaagtatacgacttttggaagcccttctggccatttgtcttcatggtgccagaactagtcaacagaagatggaattggagttacctaatcagaacttgtctgtggaaagtatattatttgaaatgagggaccatctttcccagtcaaaggtgattgaaacacaactagcaaagcctttatttgatgccctgcttcgagttgccctcgggaattattcagcagattttgaacataatgatgctatgactgagaagagtcatcaatctgcagaagaattgtcatcccagcctggtgatttttcagaagaagctgaggattctcagtgttgtagttttaaacttttagttgaagaagaaggttacgaagcagatagtgaaagcaatcctgaagatggcgaaacccaggatgatggggtagacttaaagtctgaaacagaaggtttcagtgcatcaagcagtccaaatgacttactcgaaaacctcactcaaggggaaataatttatcctgagatttgtatgctggaattaaatttgctttctgctagtaaagccaaacttgatgtgcttgcccatgtatttgagagttttttgaaaattattaggcagaaagaaaagaatgtttttctgctcatgcaacagggaactgtgaaaaatcttttaggagggttcttgagtattttaacacaggatgattctgattttcaagcatgccagagagtattggtggatcttttggtatctttgatgagttcaagaacatgttcagaagagctaacccttcttttgagaatatttctggagaaatctccttgtacaaaaattcttcttctgggtattctgaaaattattgaaagtgatactactatgagcccttcacagtatctaaccttccctttactgcacgctccaaatttaagcaacggtgtttcatcacaaaagtatcctgggattttaaacagtaaggccatgggtttattgagaagagcacgagtttcacggagcaagaaagaggctgatagagagagttttccccatcggctgctttcatcttggcacatagccccagtccacctgccgttgctggggcaaaactgctggccacacctatcagaaggtttcagtgtttccctgtggtttaatgtggagtgtatccatgaagctgagagtactacagaaaaaggaaagaagataaagaaaagaaacaaatcattaattttaccagatagcagttttgatggtacagagagcgacagaccagaaggtgcagagtacataaatcctggtgaaagactcatagaagaaggatgtattcatataatttcactgggatccaaagcgttgatgatccaagtgtgggctgatccccacaatgccactcttatctttcgtgtgtgcatggattcaaatgatgacatgaaagctgttttactagcacaggttgaatcacaggagaatattttcctcccaagcaaatggcaacatttagtactcacctacttacagcagccccaagggaaaaggaggattcatgggaaaatctccatatgggtctctggacagaggaagcctgatgttactttggattttatgcttccaagaaaaacaagtttgtcatctgatagcaataaaacattttgcatgattggccattgtttatcatcccaagaagagtttttgcagttggctggaaaatgggacctgggaaatttgcttctcttcaacggagctaaggttggttcacaagaggccttttatctgtatgcttgtggacccaaccatacatctgtaatgccatgtaagtatggcaagccagtcaatgactactccaaatatattaataaagaaattttgcgatgtgaacaaatcagagaactttttatgaccaagaaagatgtggatattggtctcttaattgaaagtctttcagttgtttatacaacttactgtcctgctcagtataccatctatgaaccagtgattagacttaaaggtcaaatgaaaacccaactctctcaaagacccttcagctcaaaagaagttcagagcatcttattagaacctcatcatctaaagaatctccaacctactgaatataaaactattcaaggcattctgcacgaaattggtggaactggcatatttgtttttctctttgccagggttgttgaactcagtagctgtgaagaaactcaagcattagcactgcgagttatactctcattaattaaatacaaccaacaaagagtacatgaattagaaaattgtaatggactttctatgattcatcaggtgttgatcaaacaaaaatgcattgttgggttttacattttgaagacccttcttgaaggatgctgtggtgaagatattatttatatgaatgagaatggagagtttaagttggatgtagactctaatgctataatccaagatgttaagctgttagaggaactattgcttgactggaagatatggagtaaagcagagcaaggtgtttgggaaactttgctagcagctctagaagtcctcatcagagcagatcaccaccagcagatgtttaatattaagcagttattgaaagctcaagtggttcatcactttctactgacttgtcaggttttgcaggaatacaaagaggggcaactcacacccatgccccgagaggtttgtagatcatttgtgaaaattatagcagaagtccttggatctcctccagatttggaattattgacaattatcttcaatttccttttagcagttcaccctcctactaatacttacgtttgtcacaatcccacgaacttctacttttctttgcacatagatggcaagatctttcaggagaaagtgcggtcaatcatgtacctgaggcattccagcagtggaggaaggtcccttatgagccctggatttatggtaataagcccatctggttttactgcttcaccatatgaaggagagaattcctctaatattattccacaacagatggccgcccatatgctgcgttctagaagcctaccagcattccctacttcttcactactaacgcaatcacaaaaactgactggaagtttgggttgtagtatcgacaggttacaaaatattgcagatacttatgttgccacccaatcaaagaaacaaaattctttggggagttccgacacactgaaaaaaggcaaagaggacgcattcatcagtagctgtgagtctgcaaaaactgtttgtgaaatggaagctgtcctctcagcccaggtctctgtcagtgatgtcccaaagggagtgctgggatttccagtggtcaaagcagatcataaacagttgggagcagaacccaggtcagaagatgacagtcctggggatgagtcctgcccacgccgacctgattacctaaagggattggcctccttccagcgaagccacagcactattgcaagccttgggctagcttttccttcacagaacggatctgcagctgttggccgttggccaagtcttgttgatagaaacactgatgattgggaaaactttgcctattctcttggttatgagccaaattacaaccgaactgcaagtgctcacagtgtaactgaagactgtttggtacctatatgctgtggattatatgaactcctaagtggggttcttcttatcctgcctgatgttttgcttgaagatgtgatggacaagcttattcaagcagatacacttttggtcctcgttaaccacccatcaccagctatacaacaaggtgttattaaactattagatgcatattttgctagagcatctaaggaacaaaaagataaatttctgaagaatcgtggattttccttgctagccaaccagttgtatcttcatcgaggaactcaagaattgttagaatgcttcatcgaaatgttctttggtcgacatattggccttgatgaagaatttgatctggaagatgtgagaaacatgggattgtttcagaagtggtctgtcattcctattctgggactaatagagacctctctatatgacaacatactcttgcataatgctcttttacttcttctccaaattttaaattcttgttctaaggtagcagatatgttgctggataatggtctactctatgtgttatgtaatacagtagcagccctgaatggattagaaaagaacattcccatgagtgaatataaattgcttgcttgtgatatacagcaacttttcatagcagttacaattcatgcttgcagttcctcaggctcacaatattttagggttattgaagaccttattgtaatgcttggatatcttcaaaatagcaaaaacaagaggacacaaaatatggctgttgcactacagcttagagttctccaggctgctatggaatttataaggaccaccgcaaatcatgactctgaaaacctcacagattcactccagtcaccttctgctccccatcatgcagtagttcaaaagcggaaaagcattgctggtcctcgaaaatttccccttgctcaaactgaatcgcttctgatgaaaatgcgttcagtggcaaatgatgagcttcatgtgatgatgcaacggagaatgagccaagagaaccctagccaagcaactgaaacggaacttgcgcagagactacagaggctcactgttttagcagtcaacaggattatttatcaagaatttaattcagacattattgacattttgagaactccagaaaatgtaactcaaagcaagacctcagttttccagaccgaaatttctgaggaaaatattcatcatgaacagtcttctgttttcaatccatttcagaaagaaatttttacatatctggtagaaggattcaaagtatctattggttcaagtaaagccagtggttccaagcagcaatggactaaaattctgtggtcttgtaaggagaccttccgaatgcagcttgggagactactagtgcatattttgtcgccagcccacgctgcacaagagagaaagcaaatttttgaaatagttcatgaaccaaatcatcaggaaatactacgagactgtctcagcccatccctacaacatggagccaagttagttttgtatttgtcagagttgatacataatcaccaaggtgaattgactgaagaagagctaggcacagcagaactgcttatgaatgctttgaagttatgtggtcacaagtgcatccctcccagtgcatcaacaaaagcagaccttattaaaatgatcaaagaggaacaaaagaaatatgaaactgaagaaggagtgaataaagctgcttggcagaaaacagttaacaataatcaacaaagtctctttcagcgtctggattcaaaatcaaaggatatatctaaaatagctgcagatatcacccaggcagtgtctctctcccaaggaaatgagagaaaaaaggtgatccagcatattagaggaatgtataaagtagatttgagtgccagcagacattggcaggaacttattcagcagctgacacatgatagagcagtatggtatgaccccatctactatccaacctcatggcagttggatccaacagaagggccaaatcgagagaggagacgtttacagagatgttatttaactattccaaataagtatctccttagggatagacagaaatcagaagatgttgtcaaaccaccactctcttacctgtttgaagacaaaactcattcttctttctcttctactgtcaaagacaaagctgcaagtgaatctataagagtgaatcgaagatgcatcagtgttgcaccatctagagagacagctggtgaattgttactaggtaaatgtggaatgtattttgtggaagataatgcttctgatacagttgaaagttcgagccttcagggagagttggaaccagcatcattttcctggacatatgaagaaattaaagaagttcacaagcgttggtggcaattgagagataatgctgtagaaatctttctaacaaatggcagaacactcctgttggcatttgataacaccaaggttcgtgatgatgtataccacaatatactcacaaataacctccctaatcttctggaatatggtaacatcaccgctctgacaaatttatggtatactgggcaaattactaattttgaatatttgactcacttaaacaaacatgctggccgatccttcaatgatctcatgcagtatcctgtgttcccatttatacttgctgactacgttagtgagacacttgacctcaatgatctgttgatatacagaaatctctctaaacctatagctgttcagtataaagaaaaagaagatcgttatgtggacacatacaagtacttggaggaagagtaccgcaaaggagccagagaagatgaccccatgcctcccgtgcagccctatcactatggctcccactattccaatagcggcactgtgcttcacttcctggtcaggatgcctcctttcactaaaatgtttttagcctatcaagatcaaagttttgacattccagacagaacttttcattctacaaatacaacttggcgactctcatcttttgaatctatgactgatgtgaaagaacttatcccagagtttttctatcttccagagttcctagttaaccgtgaaggttttgattttggtgtgcgtcagaatggtgaacgggttaatcacgtcaaccttcccccttgggcgcgtaatgatcctcgtctttttatcctcatccatcggcaggctctagagtctgactacgtgtcgcagaacatctgtcagtggattgacttggtgtttgggtataagcaaaaggggaaggcttctgttcaagcgatcaatgtttttcatcctgctacatattttggaatggatgtctctgcagttgaagatccagttcagagacgagcgctagaaaccatgataaaaacctacgggcagactccccgtcagctgttccacatggcccatgtgagcagacctggagccaagctcaatattgaaggagagcttccagctgctgtggggttgctagtgcagtttgctttcagggagacccgagaacaggtcaaagaaatcacctatccgagtcctttgtcatggataaaaggcttgaaatggggggaatacgtgggttcccccagtgctccagtacctgtggtctgcttcagccagccccacggagaaagatttggctctctccaggctctgcccaccagagcaatctgtggtttgtcacggaatttctgtcttctgatgacatatagcaaggaacaaggtgtgagaagcatgaacagtacggacattcagtggtcagccatcctgagctggggatatgctgataatattttaaggttgaagagtaaacaaagtgagcctccagtaaactttattcaaagttcacaacagtaccaggtgactagttgtgcttgggtgcctgacagttgccagctgtttactggaagcaaatgcggtgtcatcacagcctacacaaacagatttacaagcagcacgccatcagaaatagaaatggagactcaaatacatctctatggtcacacagaagagataaccagcttatttgtttgcaaaccatacagtatactgataagtgtgagcagagacggaacctgcatcatatgggatttaaacaggttatgctatgtacaaagtctggcgggacacaaaagccctgtcacagctgtctctgccagtgaaacctcaggtgatattgctactgtgtgtgattcagctggcggaggcagtgacctcagactctggacggtgaacggggatctcgttggacatgtccactgcagggagatcatctgttccgtggctttctccaaccagcctgagggagtatctatcaatgtaatcgctgggggattagaaaatggaattgtaaggttatggagcacatgggacttaaagcctgtgagagaaattacatttcccaaatcaaataagcccatcatcagccttacattttcttgtgatggccaccatttgtacacagcaaacagtgatgggaccgtgattgcctggtgtcggaaggaccagcagcgcttgaaacagccaatgttctattccttccttagcagctatgcagccgggtgaatgcgaatgaacttcacgttctccaaagcactttaactccaaactagatttgttgacttcaccagttttaggaggttgaacctaaagaaatggatgactggacaaaccatccaaataatgataaagtctattcatctgcacaaaattctgaagagtcacatgatcctaagaggaaagttctgttctattttagtgataatctggaagattgtgtcaatatgcactagccaacaagttttaagcctcgcatggtacattaaaatgatattcttaaaattttttcccaccaaggtattccaaagaaaatattaaggtctcccctttttctatgattccaaaaggaccagtagaatttaaattggttggttgattgtttatataaaacacactaaaattatattttaaaagtttactgccatgaaatactcctcccaccacacacacatgctccaaaagaggaaagaaaaaaagataatttttaggacttgataattgctttctttgagaagcaaattattcagtaggtgcctctgtaccaaatattttatggaatatctaaatactaaaataaactatgaatgaatctcaaaattaggcagtttttgccagttgctttcttagctcaaaggagaaccagaatttttttgacagccacaaacaagaatacaggtatcttggatttcagacacattctgtttcttcataaaaattttacttaaaatctgtaacgctagatattgactatccttagttgagtcactgaggtttaaacacaatggtaagtcttaaagtctgctatttacagagcattgaatctgtaccaatttgcaatagaaagccttcagtatgcaagaagtttgcatgggtattaagaacacagcctaaataaggcatttgatctaatctgcaggaagaattttcttccccaaaacagaattataaaagcttactttaaacaggaggcagaataattcttttaggaaaccatttcattctgtttctactaacctataccatctgagaattctaggaagaataataaaatctcgtgtattccacagcaaacttacataccataaagacagaattcctaaacatcttggagccgtctgtctctcccatatgatggctgtctgtatatttttacttggggtgctgctttattggctttgaaaacactgtcagataagctcagtaatatgttaccatgggataaaaatatgtatccctgcctaagaataacttgtgcatttgttatggaaatttaattcatatggtgtttacagtactacttttgtaacttccagactttctaaaacattctgcttaaaaaccatataaaatataattccaaagtctctgctgtcaagatagattcgagagaaagcacgtggccatgtatgctttaaccttaaactgcatacacatgtagtgatacctaggctgcatttagatcaccgtgtgctcaggccaggtgtgaatcctgaggtccatggaggtgcagagatgagattactcctattcacgttgaagtgatttgctttgttaacaaaaaattgcagctattgtctagctttcatttttttactgagaactttaaattagtcccctattagaatagggttgctactcatctttttttaaaaaccgaatttcatcatttatctaaagagaaaatatgcagaataactggtcttgttaagagtgcaatattatatttttatgtaaaaataaaaattaatttggggggattatttattcagcatgaaacctaatatgtatatgtttgaaatacttcataatgtgcatgttgtagcaaacatttctgtaaattatcacaagctctgttacctttatatacactgcctcttcaatttggaaataaatttcataaaaaaaaaaaaaaaaaaaa

SEQ ID NO: 110 - DNA, 561 bp, Homo sapiens
  POLR2J
  modified_base (445)..(445): a, c, t or g
  modified_base (483)..(483): a, c, t or g
  modified_base (485)..(485): a, c, t or g
  modified_base (510)..(510): a, c, t or g
  modified_base (526)..(526): a, c, t or g
  modified_base (549)..(549): a, c, t or g
  modified_base (552)..(552): a, c, t or g
  modified_base (557)..(557): a, c, t or g
agttcattcatttattccagcaacaaatatttgagaacacactgtgtcccagacactgttctaaggactggcagcgaagtccaagacaaacagtccctaccttcagcaagtttgcagtcaagcaggatgcggatgctgagcattacaagggaaatgattattctgagagaggaagtatggggtgctatgggaacatacaaccagggacctaattttatgggaaagggaccagcccagatccaacacttgctctcccagtttacctccagtaggttctttttaacttgaactaatcttgtttggtggggtacacagtgaggaaaaagaagagctagtgacaaaatctaactcccttctcagtcttaagcaaggtgaaggcaagggagtagaagatatcaagggagtgagtggtggtagccaccaaagggagatagcagactgaggncctaaaaaaagaaaggaaatctaaatctatcagcaggncngagaaagaatgcttaaggtgattanatgggatcctggatgncctttcccggattttaaaagaanccnaaccnggga

SEQ ID NO: 111 - DNA, 667 bp, Homo sapiens
  ACT2; G-26; LAG1; MIP1B; SCYA2; SCYA4; AT744.1; MGC104418; MGC126025; MGC126026; MIP-1-beta
agcacaggacacagctgggttctgaagcttctgagttctgcagcctcacctctgagaaaacctctttgccaccaataccatgaagctctgcgtgactgtcctgtctctcctcatgctagtagctgccttctgctctccagcgctctcagcaccaatgggctcagaccctcccaccgcctgctgcttttcttacactgcgaggaagcttcctcgcaactttgtggtagattactatgagaccagcagcctctgctcccagccagctgtggtattccaaaccaaaagaagcaagcaagtctgtgctgatcccagtgaatcctgggtccaggagtacgtgtatgacctggaactgaactgagctgctcagagacaggaagtcttcagggaaggtcacctgagcccggatgcttctccatgagacacatctcctccatactcaggactcctctccgcagttcctgtcccttctcttaatttaatcttttttatgtgccgtgttattgtattaggtgtcatttccattatttatattagtttagccaaaggataagtgtcccctatggggatggtccactgtcactgtttctctgctgttgcaaatacatggataacacatttgattctgtgtgttttcataataaaactttaaaataaaatgcagacagtt

SEQ ID NO: 112 - DNA, 1246 bp, Homo sapiens
  5H9; BA2; P24; GIG2; MIC3; MRP-1; BTCC-1; DRAP-27; TSPAN29
gaccagcctacagccgcctgcatctgtatccagcgccaggtcccgccagtcccagctgcgcgcgccccccagtcccgcacccgttcggcccaggctaagttagccctcaccatgccggtcaaaggaggcaccaagtgcatcaaatacctgctgttcggatttaacttcatcttctggcttgccgggattgctgtccttgccattggactatggctccgattcgactctcagaccaagagcatcttcgagcaagaaactaataataataattccagcttctacacaggagtctatattctgatcggagccggcgccctcatgatgctggtgggcttcctgggctgctgcggggctgtgcaggagtcccagtgcatgctgggactgttcttcggcttcctcttggtgatattcgccattgaaatagctgcggccatctggggatattcccacaaggatgaggtgattaaggaagtccaggagttttacaaggacacctacaacaagctgaaaaccaaggatgagccccagcgggaaacgctgaaagccatccactatgcgttgaactgctgtggtttggctgggggcgtggaacagtttatctcagacatctgccccaagaaggacgtactcgaaaccttcaccgtgaagtcctgtcctgatgccatcaaagaggtcttcgacaataaattccacatcatcggcgcagtgggcatcggcattgccgtggtcatgatatttggcatgatcttcagtatgatcttgtgctgtgctatccgcaggaaccgcgagatggtctagagtcagcttacatccctgagcaggaaagtttacccatgaagattggtgggattttttgtttgtttgttttgttttgtttgttgtttgttgtttgtttttttgccactaattttagtattcattctgcattgctagataaaagctgaagttactttatgtttgtcttttaatgcttcattcaatattgacatttgtagttgagcggggggtttggtttgctttggtttatattttttcagttgtttgtttttgcttgttatattaagcagaaatcctgcaatgaaaggtactatatttgctagactctagacaagatattgtacataaaagaatttttttgtctttaaatagatacaaatgtctatcaactttaatcaagttgtaacttatattgaagacaatttgatacataataaaaaattatgacaatgtcaaaaaaaaaaaaaaa

SEQ ID NO: 113 - DNA, 595 bp, Homo sapiens
  FLJ42627
  modified_base (384)..(384): a, c, t or g
  modified_base (544)..(544): a, c, t or g
tgagggcttttgctcgggctttttatttcacaattgatgcttaaaagtgcttttaaaggcaatattgcaactacatttatttatttatttatttgctgcagaaatgaagttatttattaaaacacacccatggtagcaagttctgatgggtctgaagaggaggcaggagcacggtgttgagcttctaaacatcgtcctgccagggagggaccctgacaggtgcttggctgacatgctgtggccgaggcaggaaggaagttgcagaattccacgaaggcagaagactaccagtaggcaggtcccatgtcatcacacccgtgagagtggcagtggtctggtggccacagagatgtctgacagcgtgggtctggagccggtgatcgntggctttgagaggttccttcaggaggtgcctggaccctgatggacagcccccagcctcacgctcccccttgaggtttgcagagggtgccagaagtgaccccagaaagggttctctgaggtgctgcggtccctacccagcagccagggctctgtctggaantggccgtgtcgtggccgtgctgaaccgctatgagtccagagcttcccgggc

SEQ ID NO: 114 - DNA, 1666 bp, Homo sapiens
  K60; NAF; GCP1; IL-8; LECT; LUCT; NAP1; 3-10C; CXCL8; GCP-1; LYNAP; MDNCF; MONAP; NAP-1; SCYB8; TSG-1; AMCF-I; b-ENAP
ctccataaggcacaaactttcagagacagcagagcacacaagcttctaggacaagagccaggaagaaaccaccggaaggaaccatctcactgtgtgtaaacatgacttccaagctggccgtggctctcttggcagccttcctgatttctgcagctctgtgtgaaggtgcagttttgccaaggagtgctaaagaacttagatgtcagtgcataaagacatactccaaacctttccaccccaaatttatcaaagaactgagagtgattgagagtggaccacactgcgccaacacagaaattattgtaaagctttctgatggaagagagctctgtctggaccccaaggaaaactgggtgcagagggttgtggagaagtttttgaagagggctgagaattcataaaaaaattcattctctgtggtatccaagaatcagtgaagatgccagtgaaacttcaagcaaatctacttcaacacttcatgtattgtgtgggtctgttgtagggttgccagatgcaatacaagattcctggttaaatttgaatttcagtaaacaatgaatagtttttcattgtaccatgaaatatccagaacatacttatatgtaaagtattatttatttgaatctacaaaaaacaacaaataatttttaaatataaggattttcctagatattgcacgggagaatatacaaatagcaaaattgaggccaagggccaagagaatatccgaactttaatttcaggaattgaatgggtttgctagaatgtgatatttgaagcatcacataaaaatgatgggacaataaattttgccataaagtcaaatttagctggaaatcctggatttttttctgttaaatctggcaaccctagtctgctagccaggatccacaagtccttgttccactgtgccttggtttctcctttatttctaagtggaaaaagtattagccaccatcttacctcacagtgatgttgtgaggacatgtggaagcactttaagttttttcatcataacataaattattttcaagtgtaacttattaacctatttattatttatgtatttatttaagcatcaaatatttgtgcaagaatttggaaaaatagaagatgaatcattgattgaatagttataaagatgttatagtaaatttattttattttagatattaaatgatgttttattagataaatttcaatcagggtttttagattaaacaaacaaacaattgggtacccagttaaattttcatttcagataaacaacaaataattttttagtataagtacattattgtttatctgaaattttaattgaactaacaatcctagtttgatactcccagtcttgtcattgccagctgtgttggtagtgctgtgttgaattacggaataatgagttagaactattaaaacagccaaaactccacagtcaatattagtaatttcttgctggttgaaacttgtttattatgtacaaatagattcttataatattatttaaatgactgcatttttaaatacaaggctttatatttttaactttaagatgtttttatgtgctctccaaattttttttactgtttctgattgtatggaaatataaaagtaaatatgaaacatttaaaatataatttgttgtcaaagtaaaaaaaaaaaaaaa

SEQ ID NO: 115 - DNA, 879 bp, Homo sapiens
  RP1-28O10.2
gcggagtctccaactgggagagctgcagctgccgagaggaggagaacgctgaggtcggtcggaccaacggacgcgctgaccgctgccaactgcagctcgcgctgcctcctgctcgcgccgtgccactaaggtcactcccgcctccgagagcccagagccgagatggaaacggtccaggagctgatccccctggccaaggagatgatggcccagaagcgcaaggggaagatggtgaagctgtacgtgctgggcagcgtgctggccctcttcggcgtggtgctcggcctgatggagactgtgtgcagccccttcacggccgccagacgtctgcgggaccaggaggcagccgtggcggagctgcaggccgccctggagcgacaggctctccagaagcaagccctgcaggagaaaggcaagcagcaggacacggtcctcggcggccgggccctgtccaaccggcagcacgcctcctaggaactgtgggagaccagcggagtgggagggagacgcagtagacagagacagaccgagaaggaagggagagacagagggggcgcgcgcacaggagcctgactccgctgggagagtgcaggagcacgtgctgttttttatttggacttaacttcagagaaaccgctgacatctagaactgacctaccacaagcatccaccaaaggagtttgggattgagttttgctgctgtgcagcactgcattgtcatgacatttccaacactgtgtgaattatctaaatgcgtctaccattttgcactagggaggaaggataaatgctttttatgttattattattaattattacaatgaccaccattttgcattttgaaataaaaaactttttataccaaaaaaaaaaaaaaaa

SEQ ID NO: 116 - DNA, 976 bp, Homo sapiens
  TPD52
  modified_base (680)..(680): a, c, t or g
aagggtggcaagacgtgacagcaacatctgcttacaagaaggacatctgaaaccttatcccaggctggacagaaggcctcagctgctttttcgtctgttggctcagtcatcaccaaaaagctggaagatgtaaaaaactccccaacttttaaatcatttgaagaaaaggtcgaaaacttaaagtctaaagtagggggaaccaagcctgctggtggtgatttttgagaagtcttgaattcggctgcaaatgctagtgccaccaccacggagcctcttccagaaaagacacaggagagcctgtgagattcctaccttgttctgctacccactgccagatgctgcaagcgaggtccaagcacatcttgtcaacatgcattgccatgaatttctaccagatgtgcttttatttagctttacattttcctttggccaataggttggggggtaaacccaaataggaaatataactcttcacctcatatctctgtgggaaacacccctttaggtgtacatttatgttcctttatttaggaaacaccattataaaaacacttatagtaaatggggacattcactataatgatctaagaagctacagatgtcatagtgttttcctgctttacaaaattgctccagatctggaatgcagttgaccttgtcttctataatatttccttttnttccccctctttgaatctctgtatatttgattcttaactaaaatggttctcttaatatctgaatcgtggtaattacacgtcgggtgaatttccttactccaggaaagactactaggtacagaaatattctggataggttggtgggttacggacattttggtgacgacccagatgagtaccgtgggcccatctatcggtggaggacaaagtacacccaggacgaagggcctattatggcgggaagacatcgttggtccaatacaatacggatatttaaaaggacacgggggaaccga

SEQ ID NO: 117 - DNA, 3037 bp, Homo sapiens
  ATDC
ctcctcacaggtgtgtctctagtcctcgtggttgcctgccccactccctgccgagacgcctgccagaaaggtcacctatcctgaaccccagcaagcctgaaacagctcagccaagcaccctgcgatggaagctgcagatgcctccaggagcaacgggtcgagcccagaagccagggatgcccggagcccgtcgggccccagtggcagcctggagaatggcaccaaggctgacggcaaggatgccaagaccaccaacgggcacggcggggaggcagctgagggcaagagcctgggcagcgccctgaagccaggggaaggtaggagcgccctgttcgcgggcaatgagtggcggcgacccatcatccagtttgtcgagtccggggacgacaagaactccaactacttcagcatggactctatggaaggcaagaggtcgccgtacgcagggctccagctgggggctgccaagaagccacccgttacctttgccgaaaagggcgagctgcgcaagtccattttctcggagtcccggaagcccacggtgtccatcatggagcccggggagacccggcggaacagctacccccgggccgacacgggccttttttcacggtccaagtccggctccgaggaggtgctgtgcgactcctgcatcggcaacaagcagaaggcggtcaagtcctgcctggtgtgccaggcctccttctgcgagctgcatctcaagccccacctggagggcgccgccttccgagaccaccagctgctcgagcccatccgggactttgaggcccgcaagtgtcccgtgcatggcaagacgatggagctcttctgccagaccgaccagacctgcatctgctacctttgcatgttccaggagcacaagaatcatagcaccgtgacagtggaggaggccaaggccgagaaggagacggagctgtcattgcaaaaggagcagctgcagctcaagatcattgagattgaggatgaagctgagaagtggcagaaggagaaggaccgcatcaagagcttcaccaccaatgagaaggccatcctggagcagaacttccgggacctggtgcgggacctggagaagcaaaaggaggaagtgagggctgcgctggagcagcgggagcaggatgctgtggaccaagtgaaggtgatcatggatgctctggatgagagagccaaggtgctgcatgaggacaagcagacccgggagcagctgcatagcatcagcgactctgtgttgtttctgcaggaatttggtgcattgatgagcaattactctctccccccacccctgcccacctatcatgtcctgctggagggggagggcctgggacagtcactaggcaacttcaaggacgacctgctcaatgtatgcatgcgccacgttgagaagatgtgcaaggcggacctgagccgtaacttcattgagaggaaccacatggagaacggtggtgaccatcgctatgtgaacaactacacgaacagcttcgggggtgagtggagtgcaccggacaccatgaagagatactccatgtacctgacacccaaaggtggggtccggacatcataccagccctcgtctcctggccgcttcaccaaggagaccacccagaagaatttcaacaatctctatggcaccaaaggtaactacacctcccgggtctgggagtactcctccagcattcagaactctgacaatgacctgcccgtcgtccaaggcagctcctccttctccctgaaaggctatccctccctcatgcggagccaaagccccaaggcccagccccagacttggaaatctggcaagcagactatgctgtctcactaccggccattctacgtcaacaaaggcaacgggattgggtccaacgaagccccatgagctcctggcggaaggaacgaggcgccacacccctgctcttcctcctgaccctgctgctcttgccttctaagctactgtgcttgtctgggtgggagggagcctggtcctgcacctgccctctgcagccctctgccagcctcttgggggcagttccggcctctccgacttccccactggccacactccattcagactcctttcctgccttgtgacctcagatggtcaccatcattcctgtgctcagaggccaacccatcacaggggtgagataggttggggcctgccctaacccgccagcctcctcctctcgggctggatctgggggctagcagtgagtacccgcatggtatcagcctgcctctcccgcccacgccctgctgtctccaggcctatagacgtttctctccaaggccctatcccccaatgttgtcagcagatgcctggacagcacagccacccatctcccattcacatggcccacctcctgcttcccagaggactggccctacgtgctctctctcgtcctacctatcaatgcccagcatggcagaacctgcagcccttggccactgcagatggaaacctctcagtgtcttgacatcaccctacccaggcggtgggtctccaccacagccactttgagtctgtggtccctggagggtggcttctcctgactggcaggatgaccttagccaagatattcctctgttccctctgctgagataaagaattcccttaacatgatataatccacccatgcaaatagctactggcccagctaccatttaccatttgcctacagaatttcattcagtctacactttggcattctctctggcgatggagtgtggctgggctgaccgcaaaaggtgccttacacactgcccccaccctcagccgttgccccatcagaggctgcctcctccttctgattaccccccatgttgcatatcagggtgctcaaggattggagaggagacaaaaccaggagcagcacagtggggacatctcccgtctcaacagccccaggcctatgggggctctggaaggatgggccagcttgcaggggttggggagggagacatccagcttgggctttcccctttggaataaaccattggtctgtcaaaaaaaaaaaaaaaaaaa

SEQ ID NO: 118 - DNA, 1225 bp, Homo sapiens
  FB22; HM89; LAP3; LCR1; NPYR; WHIM; CD184; LESTR; NPY3R; NPYRL; HSY3RR; NPYY3R; D2S201E
cgcatctggagaaccagcggttaccatggaggggatcagtatatacacttcagataactacaccgaggaaatgggctcaggggactatgactccatgaaggaaccctgtttccgtgaagaaaatgctaatttcaataaaatcttcctgcccaccatctactccatcatcttcttaactggcattgtgggcaatggattggtcatcctggtcatgggttaccagaagaaactgagaagcatgacggacaagtacaggctgcacctgtcagtggccgacctcctctttgtcatcacgcttcccttctgggcagttgatgccgtggcaaactggtactttgggaacttcctatgcaaggcagtccatgtcatctacacagtcaacctctacagcagtgtcctcatcctggccttcatcagtctggaccgctacctggccatcgtccacgccaccaacagtcagaggccaaggaagctgttggctgaaaaggtggtctatgttggcgtctggatccctgccctcctgctgactattcccgacttcatctttgccaacgtcagtgaggcagatgacagatatatctgtgaccgcttctaccccaatgacttgtgggtggttgtgttccagtttcagcacatcatggttggccttatcctgcctggtattgtcatcctgtcctgctattgcattatcatctccaagctgtcacactccaagggccaccagaagcgcaaggccctcaagaccacagtcatcctcatcctggctttcttcgcctgttggctgccttactacattgggatcagcatcgactccttcatcctcctggaaatcatcaagcaagggtgtgagtttgagaacactgtgcacaagtggatttccatcaccgaggccctagctttcttccactgttgtctgaaccccatcctctatgctttccttggagccaaatttaaaacctctgcccagcacgcactcacctctgtgagcagagggtccagcctcaagatcctctccaaaggaaagcgaggtggacattcatctgtttccactgagtctgagtcttcaagttttcactccagctaacacagatgtaaaagactttttttttatacgataaataacttttttttaagttacacatttttcagatataaaagactgaccaatattgtacagtttttattgcttgttggatttttgtcttgtgtttctttagtttttgtg

SEQ ID NO: 119 - DNA, 845 bp, Homo sapiens
  H2B/S; H2BFT; H2BFAiii; MGC131989
ctcgatctgctgctcgtctcaggctcgtagttcgccttcaacatgccggaaccagcgaagtccgctcccgcgcccaagaagggctcgaagaaagccgtgactaaggcgcagaagaaggacggcaagaagcgcaagcgcagccgcaaggagagctactccgtatacgtgtacaaggtgctgaagcaggtccaccccgacaccggcatctcctctaaggccatgggaatcatgaactccttcgtcaacgacatcttcgaacgcatcgcgggtgaggcttcccgcctggcgcattacaacaagcgctcgaccatcacctccagggagatccagacggccgtgcgcctgctgctgcccggggagttggccaagcacgccgtgtccgagggcaccaaggccgtcaccaagtacaccagcgctaagtaaacttgccaaggagggactttctctggaatttcctgatatgaccaagaaagcttcttatcaaaagaagcacaattgccttcggttacctcattatctactgcagaaaagaagacgagaatgcaaccatacctagatggacttttccacaagctaaagctggcctcttgatctcattcagattccaaagagaatcatttacaagttaatttctgtctccttggtccattccttctctctaataatcatttactgttcctcaaagaattgtctacattacccatctcctcttttgcctctgagaaagagtatataagcttctgtaccccactggggggttggggtaatattctgtggtcctcagccctgtaccttaataaatttgtatgccttttctcttaaaaaaaaaaaaaaaaaaaaaaaaa

SEQ ID NO: 120 - DNA, 1439 bp, Homo sapiens
  IBP2; IGF-BP53
tgcggcggcgagggaggaggaagaagcggaggaggcggctcccgcgctcgcagggccgtgccacctgcccgcccgcccgctcgctcgctcgcccgccgcgccgcgctgccgaccgccagcatgctgccgagagtgggctgccccgcgctgccgctgccgccgccgccgctgctgccgctgctgccgctgctgctgctgctactgggcgcgagtggcggcggcggcggggcgcgcgcggaggtgctgttccgctgcccgccctgcacacccgagcgcctggccgcctgcgggcccccgccggttgcgccgcccgccgcggtggccgcagtggccggaggcgcccgcatgccatgcgcggagctcgtccgggagccgggctgcggctgctgctcggtgtgcgcccggctggagggcgaggcgtgcggcgtctacaccccgcgctgcggccaggggctgcgctgctatccccacccgggctccgagctgcccctgcaggcgctggtcatgggcgagggcacttgtgagaagcgccgggacgccgagtatggcgccagcccggagcaggttgcagacaatggcgatgaccactcagaaggaggcctggtggagaaccacgtggacagcaccatgaacatgttgggcgggggaggcagtgctggccggaagcccctcaagtcgggtatgaaggagctggccgtgttccgggagaaggtcactgagcagcaccggcagatgggcaagggtggcaagcatcaccttggcctggaggagcccaagaagctgcgaccaccccctgccaggactccctgccaacaggaactggaccaggtcctggagcggatctccaccatgcgccttccggatgagcggggccctctggagcacctctactccctgcacatccccaactgtgacaagcatggcctgtacaacctcaaacagtgcaagatgtctctgaacgggcagcgtggggagtgctggtgtgtgaaccccaacaccgggaagctgatccagggagcccccaccatccggggggaccccgagtgtcatctcttctacaatgagcagcaggaggctcgcggggtgcacacccagcggatgcagtagaccgcagccagccggtgcctggcgcccctgccccccgcccctctccaaacaccggcagaaaacggagagtgcttgggtggtgggtgctggaggattttccagttctgacacacgtatttatatttggaaagagaccagcaccgagctcggcacctccccggcctctctcttcccagctgcagatgccacacctgctccttcttgctttccccgggggaggaagggggttgtggtcggggagctggggtacaggtttggggagggggaagagaaatttttatttttgaacccctgtgtcccttttgcataagattaaaggaaggaaaagtaaa

SEQ ID NO: 121 - DNA, 10442 bp, Homo sapiens
  TGD; ABC1; CERP; ABC-1; HDLDT1; FLJ14958
  modified_base (9881)..(9881): a, c, t or g
  modified_base (9884)..(9884): a, c, t or g
  modified_base (9999)..(9999): a, c, t or g
  modified_base (10046)..(10046): a, c, t or g
ggccgggacccgcagagccgagccgacccttctctcccgggctgcggcagggcagggcggggagctccgcgcaccaacagagccggttctcagggcgctttgctccttgttttttccccggttctgttttctccccttctccggaaggcttgtcaaggggtaggagaaagagacgcaaacacaaaagtggaaaacagttaatgaccagccacgggcgtccctgctgtgagctctggccgctgccttccagggctcccgagccacacgctgggcgtgctggctgagggaacatggcttgttggcctcagctgaggttgctgctgtggaagaacctcactttcagaagaagacaaacatgtcagctgttactggaagtggcctggcctctatttatcttcctgatcctgatctctgttcggctgagctacccaccctatgaacaacatgaatgccattttccaaataaagccatgccctctgcaggaacacttccttgggttcaggggattatctgtaatgccaacaacccctgtttccgttacccgactcctggggaggctcccggagttgttggaaactttaacaaatccattgtggctcgcctgttctcagatgctcggaggcttcttttatacagccagaaagacaccagcatgaaggacatgcgcaaagttctgagaacattacagcagatcaagaaatccagctcaaacttgaagcttcaagatttcctggtggacaatgaaaccttctctgggttcctatatcacaacctctctctcccaaagtctactgtggacaagatgctgagggctgatgtcattctccacaaggtatttttgcaaggctaccagttacatttgacaagtctgtgcaatggatcaaaatcagaagagatgattcaacttggtgaccaagaagtttctgagctttgtggcctaccaaaggagaaactggctgcagcagagcgagtacttcgttccaacatggacatcctgaagccaatcctgagaacactaaactctacatctcccttcccgagcaaggagctggctgaagccacaaaaacattgctgcatagtcttgggactctggcccaggagctgttcagcatgagaagctggagtgacatgcgacaggaggtgatgtttctgaccaatgtgaacagctccagctcctccacccaaatctaccaggctgtgtctcgtattgtctgcgggcatcccgagggaggggggctgaagatcaagtctctcaactggtatgaggacaacaactacaaagccctctttggaggcaatggcactgaggaagatgctgaaaccttctatgacaactctacaactccttactgcaatgatttgatgaagaatttggagtctagtcctctttcccgcattatctggaaagctctgaagccgctgctcgttgggaagatcctgtatacacctgacactccagccacaaggcaggtcatggctgaggtgaacaagaccttccaggaactggctgtgttccatgatctggaaggcatgtgggaggaactcagccccaagatctggaccttcatggagaacagccaagaaatggaccttgtccggatgctgttggacagcagggacaatgaccacttttgggaacagcagttggatggcttagattggacagcccaagacatcgtggcgtttttggccaagcacccagaggatgtccagtccagtaatggttctgtgtacacctggagagaagctttcaacgagactaaccaggcaatccggaccatatctcgcttcatggagtgtgtcaacctgaacaagctagaacccatagcaacagaagtctggctcatcaacaagtccatggagctgctggatgagaggaagttctgggctggtattgtgttcactggaattactccaggcagcattgagctgccccatcatgtcaagtacaagatccgaatggacattgacaatgtggagaggacaaataaaatcaaggatgggtactgggaccctggtcctcgagctgacccctttgaggacatgcggtacgtctgggggggcttcgcctacttgcaggatgtggtggagcaggcaatcatcagggtgctgacgggcaccgagaagaaaactggtgtctatatgcaacagatgccctatccctgttacgttgatgacatctttctgcgggtgatgagccggtcaatgcccctcttcatgacgctggcctggatttactcagtggctgtgatcatcaagggcatcgtgtatgagaaggaggcacggctgaaagagaccatgcggatcatgggcctggacaacagcatactctggtttagctggttcattagtagcctcattcctcttcttgtgagcgctggcctgctagtggtcatcctgaagttaggaaacctgctgccctacagtgatcccagcgtggtgtttgtcttcctgtccgtgtttgctgtggtgacaatcctgcagtgcttcctgattagcacactcttctccagagccaacctggcagcagcctgtgggggcatcatctacttcacgctgtacctgccctacgtcctgtgtgtggcatggcaggactacgtgggcttcacactcaagatcttcgctagcctgctgtctcctgtggcttttgggtttggctgtgagtactttgccctttttgaggagcagggcattggagtgcagtgggacaacctgtttgagagtcctgtggaggaagatggcttcaatctcaccacttcgatctccatgatgctgtttgacaccttcctctatggggtgatgacctggtacattgaggctgtctttccaggccagtacggaattcccaggccctggtattttccttgcaccaagtcctactggtttggcgaggaaagtgatgagaagagccaccctggttccaaccagaagagaatgtcagaaatctgcatggaggaggaacccacccacttgaagctgggcgtgtccattcagaacctggtaaaagtctaccgagatgggatgaaggtggctgtcgatggcctggcactgaatttttatgagggccagatcacctccttcctgggccacaatggagcggggaagacgaccaccatgtcaatcctgaccgggttgttccccccgacctcgggcaccgcctacatcctgggaaaagacattcgctctgagatgagcaccatccggcagaacctgggggtctgtccccagcataacgtgctgtttgacatgctgactgtcgaagaacacatctggttctatgcccgcttgaaagggctctctgagaagcacgtgaaggcggagatggagcagatggccctggatgttggtttgccatcaagcaagctgaaaagcaaaacaagccagctgtcaggtggaatgcagagaaagctatctgtggccttggcctttgtcgggggatctaaggttgtcattctggatgaacccacagctggtgtggacccttactcccgcaggggaatatgggagctgctgctgaaataccgacaaggccgcaccattattctctctacacaccacatggatgaagcggacgtcctgggggacaggattgccatcatctcccatgggaagctgtgctgtgtgggctcctccctgtttctgaagaaccagctgggaacaggctactacctgaccttggtcaagaaagatgtggaatcctccctcagttcctgcagaaacagtagtagcactgtgtcatacctgaaaaaggaggacagtgtttctcagagcagttctgatgctggcctgggcagcgaccatgagagtgacacgctgaccatcgatgtctctgctatctccaacctcatcaggaagcatgtgtctgaagcccggctggtggaagacatagggcatgagctgacctatgtgctgccatatgaagctgctaaggagggagcctttgtggaactctttcatgagattgatgaccggctctcagacctgggcatttctagttatggcatctcagagacgaccctggaagaaatattcctcaaggtggccgaagagagtggggtggatgctgagacctcagatggtaccttgccagcaagacgaaacaggcgggccttcggggacaagcagagctgtcttcgcccgttcactgaagatgatgctgctgatccaaatgattctgacatagacccagaatccagagagacagacttgctcagtgggatggatggcaaagggtcctaccaggtgaaaggctggaaacttacacagcaacagtttgtggcccttttgtggaagagactgctaattgccagacggagtcggaaaggattttttgctcagattgtcttgccagctgtgtttgtctgcattgcccttgtgttcagcctgatcgtgccaccctttggcaagtaccccagcctggaacttcagccctggatgtacaacgaacagtacacatttgtcagcaatgatgctcctgaggacacgggaaccctggaactcttaaacgccctcaccaaagaccctggcttcgggacccgctgtatggaaggaaacccaatcccagacacgccctgccaggcaggggaggaagagtggaccactgccccagttccccagaccatcatggacctcttccagaatgggaactggacaatgcagaacccttcacctgcatgccagtgtagcagcgacaaaatcaagaagatgctgcctgtgtgtcccccaggggcaggggggctgcctcctccacaaagaaaacaaaacactgcagatatccttcaggacctgacaggaagaaacatttcggattatctggtgaagacgtatgtgcagatcatagccaaaagcttaaagaacaagatctgggtgaatgagtttaggtatggcggcttttccctgggtgtcagtaatactcaagcacttcctccgagtcaagaagttaatgatgccatcaaacaaatgaagaaacacctaaagctggccaaggacagttctgcagatcgatttctcaacagcttgggaagatttatgacaggactggacaccagaaataatgtcaaggtgtggttcaataacaagggctggcatgcaatcagctctttcctgaatgtcatcaacaatgccattctccgggccaacctgcaaaagggagagaaccctagccattatggaattactgctttcaatcatcccctgaatctcaccaagcagcagctctcagaggtggctctgatgaccacatcagtggatgtccttgtgtccatctgtgtcatctttgcaatgtccttcgtcccagccagctttgtcgtattcctgatccaggagcgggtcagcaaagcaaaacacctgcagttcatcagtggagtgaagcctgtcatctactggctctctaattttgtctgggatatgtgcaattacgttgtccctgccacactggtcattatcatcttcatctgcttccagcagaagtcctatgtgtcctccaccaatctgcctgtgctagcccttctacttttgctgtatgggtggtcaatcacacctctcatgtacccagcctcctttgtgttcaagatccccagcacagcctatgtggtgctcaccagcgtgaacctcttcattggcattaatggcagcgtggccacctttgtgctggagctgttcaccgacaataagctgaataatatcaatgatatcctgaagtccgtgttcttgatcttcccacatttttgcctgggacgagggctcatcgacatggtgaaaaaccaggcaatggctgatgccctggaaaggtttggggagaatcgctttgtgtcaccattatcttgggacttggtgggacgaaacctcttcgccatggccgtggaaggggtggtgttcttcctcattactgttctgatccagtacagattcttcatcaggcccagacctgtaaatgcaaagctatctcctctgaatgatgaagatgaagatgtgaggcgggaaagacagagaattcttgatggtggaggccagaatgacatcttagaaatcaaggagttgacgaagatatatagaaggaagcggaagcctgctgttgacaggatttgcgtgggcattcctcctggtgagtgctttgggctcctgggagttaatggggctggaaaatcatcaactttcaagatgttaacaggagataccactgttaccagaggagatgctttccttaacaaaaatagtatcttatcaaacatccatgaagtacatcagaacatgggctactgccctcagtttgatgccatcacagagctgttgactgggagagaacacgtggagttctttgcccttttgagaggagtcccagagaaagaagttggcaaggttggtgagtgggcgattcggaaactgggcctcgtgaagtatggagaaaaatatgctggtaactatagtggaggcaacaaacgcaagctctctacagccatggctttgatcggcgggcctcctgtggtgtttctggatgaacccaccacaggcatggatcccaaagcccggcggttcttgtggaattgtgccctaagtgttgtcaaggaggggagatcagtagtgcttacatctcatagtatggaagaatgtgaagctctttgcactaggatggcaatcatggtcaatggaaggttcaggtgccttggcagtgtccagcatctaaaaaataggtttggagatggttatacaatagttgtacgaatagcagggtccaacccggacctgaagcctgtccaggatttctttggacttgcatttcctggaagtgttctaaaagagaaacaccggaacatgctacaataccagcttccatcttcattatcttctctggccaggatattcagcatcctctcccagagcaaaaagcgactccacatagaagactactctgtttctcagacaacacttgaccaagtatttgtgaactttgccaaggaccaaagtgatgatgaccacttaaaagacctctcattacacaaaaaccagacagtagtggacgttgcagttctcacatcttttctacaggatgagaaagtgaaagaaagctatgtatgaagaatcctgttcatacggggtggctgaaagtaaagaggaactagactttcctttgcaccatgtgaagtgttgtggagaaaagagccagaagttgatgtgggaagaagtaaactggatactgtactgatactattcaatgcaatgcaattcaatgcaatgaaaacaaaattccattacaggggcagtgcctttgtagcctatgtcttgtatggctctcaagtgaaagacttgaatttagttttttacctatacctatgtgaaactctattatggaacccaatggacatatgggtttgaactcacactttttttttttttttgttcctgtgtattctcattggggttgcaacaataattcatcaagtaatcatggccagcgattattgatcaaaatcaaaaggtaatgcacatcctcattcactaagccatgccatgcccaggagactggtttcccggtgacacatccattgctggcaatgagtgtgccagagttattagtgccaagtttttcagaaagtttgaagcaccatggtgtgtcatgctcacttttgtgaaagctgctctgctcagagtctatcaacattgaatatcagttgacagaatggtgccatgcgtggctaacatcctgctttgattccctctgataagctgttctggtggcagtaacatgcaacaaaaatgtgggtgtctctaggcacgggaaacttggttccattgttatattgtcctatgcttcgagccatgggtctacagggtcatccttatgagactcttaaatatacttagatcctggtaagaggcaaagaatcaacagccaaactgctggggctgcaagctgctgaagccagggcatgggattaaagagattgtgcgttcaaacctagggaagcctgtgcccatttgtcctgactgtctgctaacatggtacactgcatctcaagatgtttatctgacacaagtgtattatttctggctttttgaattaatctagaaaatgaaaagatggagttgtattttgacaaaaatgtttgtactttttaatgttatttggaattttaagttctatcagtgacttctgaatccttagaatggcctctttgtagaaccctgtggtatagaggagtatggccactgccccactatttttattttcttatgtaagtttgcatatcagtcatgactagtgcctagaaagcaatgtgatggtcaggatctcatgacattatatttgagtttctttcagatcatttaggatactcttaatctcacttcatcaatcaaatattttttgagtgtatgctgtagctgaaagagtatgtacgtacgtataagactagagagatattaagtctcagtacacttcctgtgccatgttattcagctcactggtttacaaatataggttgtcttgtggttgtaggagcccactgtaacaatattgggcagccttttttttttttttttaattgcaacaatgcaaaagccaagaaagtataagggtcacaagtttaaacaatgaattcttcaacagggaaaacagctagcttgaaaacttgctgaaaaacacaacttgtgtttatggcatttagtaccttcaaataattggctttgcagatattggataccccattaaatctgacagtctcaaatttttcatctcttcaatcactagtcaagaaaaatataaaaacaacaaatacttccatatggagcatttttcagagttttctaacccagtcttatttttctagtcagtaaacatttgtaaaaatactgtttcactaatacttactgttaactgtcttgagagaaaagaaaaatatgagagaactattgtttggggaagttcaagtgatctttcaatatcattactaacttcttccactttttccaaaatttgaatattaacgctaaaggtgtaagacttcagatttcaaattaatctttctatattttttaaatttacagaatattatataacccactgctgaaaaagaaaaaaatgattgttttagaagttaaagtcaatattgattttaaatataagtaatgaaggcatatttccaataactagtgatatggcatcgttgcaatttacagtatcttcaaaaatacagaatttatagaataatttctcctcatttaatatttttcaaaatcaaagttatggtttcctcattttactaaaatcgtattctaattcttcattatagtaaatctatgagcaactccttacttcggttcctctgatttcaaggccatattttaaaaaatcaaaaggcactgtgaactattttgaagaaaacacgacattttaatacagattgaaaggacctcttctgaagctagaaacaatctatagttatacatcttcattaatactgtgttaccttttaaaatagtaattttttacattttcctgtgtaaacctaattgtggtagaaatttttaccaactctatactcaatcaagcaaaatttctgtatattccctgtggaatgtacctatgtgagtttcagaaattctcaaaatacgtgttcaaaaatttctgcttttgcatctttgggacacctcagaaaacttattaacaactgtgaatatgagaaatacagaagaaaataataagccctctatacataaatgcccagcacaattcattgttaaaaaacaaccaaacctcacactactgtatttcattatctgtactgaaagcaaatgctttgtgactattaaatgttgcacatcattcattcactgtatagtaatcattgactaaagccatttgctgtgttttcttcttgtggntgnatatatcaggtaaaatattttccaaagagccatgtgtcatgtaatactgaaccctttgatattgagacattaatttggacccttggtattatctactagaataatgtaatactgnagaaatattgctctaattctttcaaaatggtgcatcccccttaaaangttctatttccataaggatttagcttgcttatcccttcttataccctaagatgaagctgtttttgtgctctttgttcatcattggccctcattccaagcactttacgctgtctgtaatgggatctatttttgcactggaatatctgagaattgcaaaactagacaaaagtttcacaacagatttctaagttaaatcattttcattaaaaggaaaaaagaaaaaaaattttgtatgtcaataactttatatgaagtattaaaatgcatatttctatgttgtaatataatgagtcacaaaataaagctgtgacagttctgttaaaaaaaaaaaaaaaaaaaaaaaaaaaaaaaaaaaaaaaaaaaaaaaaaaaaaaaaaaaaaaaaaaaaaaaaaaaa

SEQ ID NO: 122 - DNA, 633 bp, Homo sapiens
  G1P2; UCRP; IFI15
cggctgagaggcagcgaactcatctttgccagtacaggagcttgtgccgtggcccacagcccacagcccacagccatgggctgggacctgacggtgaagatgctggcgggcaacgaattccaggtgtccctgagcagctccatgtcggtgtcagagctgaaggcgcagatcacccagaagattggcgtgcacgccttccagcagcgtctggctgtccacccgagcggtgtggcgctgcaggacagggtcccccttgccagccagggcctgggccctggcagcacggtcctgctggtggtggacaaatgcgacgaacctctgagcatcctggtgaggaataacaagggccgcagcagcacctacgaggtccggctgacgcagaccgtggcccacctgaagcagcaagtgagcgggctggagggtgtgcaggacgacctgttctggctgaccttcgaggggaagcccctggaggaccagctcccgctgggggagtacggcctcaagcccctgagcaccgtgttcatgaatctgcgcctgcggggaggcggcacagagcctggcgggcggagctaagggcctccaccagcatccgagcaggatcaagggccggaaataaaggctgttgtaagagaa

SEQ ID NO: 123 - DNA, 942 bp, Homo sapiens
  APC
atgagcatcggcctcctgtgctgtgcagccttgtctctcctgtgggcaggtccagtgaatgctggtgtcactcagaccccaaaattccaggtcctgaagacaggacagagcatgacactgcagtgtgcccaggatatgaaccatgaatacatgtcctggtatcgacaagacccaggcatggggctgaggctgattcattactcagttggtgctggtatcactgaccaaggagaagtccccaatggctacaatgtctccagatcaaccacagaggatttcccgctcaggctgctgtcggctgctccctcccagacatctgtgtacttctgtgccagcagtttcccccggcagccgtcctacaatgagcagttcttcgggccagggacacggctcaccgtgctagaggacctgaaaaacgtgttcccacccgaggtcgctgtgtttgagccatcagaagcagagatctcccacacccaaaaggccacactggtgtgcctggccacaggtttctaccccgaccacgtggagctgagctggtgggtgaatgggaaggaggtgcacagtggggtcagcacagacccgcagcccctcaaggagcagcccgccctcaatgactccagatactgcctgagcagccgcctgagggtctcggccaccttctggcagaacccccgcaaccacttccgctgtcaagtccagttctacgggctctcggagaatgacgagtggacccaggatagggccaaacctgtcacccagatcgtcagcgccgaggcctggggtagagcagactgtggcttcacctccgagtcttaccagcaaggggtcctgtctgccaccatcctctatgagatcttgctagggaaggccaccttgtatgctgtgctggtcagtgccctcgtgctgatggccatggtcaagagaaaggattccagaggctga

SEQ ID NO: 124 - DNA, 3591 bp, Homo sapiens
  H731; MGC33046; MGC33047
cgaccacccggcctcggccaataagcgccgccctctcgcccccgtgttactgggtagaagaaaacaaaaacaaacagagcgagaagggccagagactctccgaggcggcggcagagacagaagagcggggtcggggccggctgaccaggaacctgggcgagcagcggcgggggcccgagggattctgaaggaagatttccattaggtaatttgtttaatcagtgcaagcgaaattaagggaaaatggatgtagaaaatgagcagatactgaatgtaaaccctgcagatcctgataacttaagtgactctctcttttccggtgatgaagaaaatgctgggactgaggaaataaagaatgaaataaatggaaattggatttcagcatcctccattaacgaagctagaattaatgccaaggcaaaaaggcgactaaggaaaaactcatcccgggactctggcagaggcgattcggtcagcgacagtgggagtgacgcccttagaagtggattaactgtgccaaccagtccaaagggaaggttgctggataggcgatccagatctgggaaaggaaggggactaccaaagaaaggtggtgcaggaggcaaaggtgtctggggtacacctggacaggtgtatgatgtggaggaggtggatgtgaaagatcctaactatgatgatgaccaggagaactgtgtttatgaaactgtagttttgcctttggatgaaagggcatttgagaagactttaacaccaatcatacaggaatattttgagcatggagatactaatgaagttgcggaaatgttaagagatttaaatcttggtgaaatgaaaagtggagtaccagtgttggcagtatccttagcattggaggggaaggctagtcatagagagatgacatctaagcttctttctgacctttgtgggacagtaatgagcacaactgatgtggaaaaatcatttgataaattgttgaaagatctacctgaattagcactggatactcctagagcaccacagttggtgggccagtttattgctagagctgttggagatggaattttatgtaatacctatattgatagttacaaaggaactgtagattgtgtgcaggctagagctgctctggataaggctaccgtgcttctgagtatgtctaaaggtggaaagcgtaaagatagtgtgtggggctctggaggtgggcagcaatctgtcaatcaccttgttaaagagattgatatgctgctgaaagaatatttactctctggagacatatctgaagctgaacattgccttaaggaactggaagtacctcattttcaccatgagcttgtatatgaagctattataatggttttagagtcaactggagaaagtacatttaagatgattttggatttattaaagtccctttggaagtcttctaccattactgtagaccaaatgaaaagaggttatgagagaatttacaatgaaattccggacattaatctggatgtcccacattcatactctgtgctggagcggtttgtagaagaatgttttcaggctggaataatttccaaacaactcagagatctttgtccttcaaggggcagaaagcgttttgtaagcgaaggagatggaggtcgtcttaaaccagagagctactgaatataagaactcttgcagtcttagatgttataaaaatatatatctgaattgtaagagttgttagcacaagttttttttttttttttttttaagcacttgttttgggtacaaggcatttctgacattttataaacctacatttaaggggaatttttaaaggaaatgttttttcttttttttttgtttttcgagggggcaaggagggacagaaaagtaacctcttcttaagtggaatattctaataagctaccttttgtaagtgccatgtttattatctaatcattccaagttttgcattgatgtctgactgccactcctttctttcaaggacagtgttttttgtagtaaaatcactggtttatacaaagctttatttagggggtaaagttaagctgctaaaaccccatgttggctgctgctgttgagatactgtgctttgggagtaaaaaaagaaagttatttctttgtcttaaagaatttttaaaaaattagtcatgagacttattcatctttccagggaacatactgattggtcttaaaagactagacagttaagtaaaaggtggctggaacatctatttttctacaaaactggaaaaatgaacctggttctagaagaatgtacaccaaaataaaacatgtgaagcagtattgattctttattgggagtacatttttttaggtctcttaaactttaatttcacacagtaaattttgaatctcataaggaagcatatttgaacctagtcaatttaatcttagtgttcccttgaaaactttttttccctacaaaattttaagtgaaaaatacaatagtaaattaagattacactggggaaaaaaatgcaggtatcactttactccattgttatctgacctagagcttaattaagttttagaaatatgtaataccttccatcattccatcatccttaaattctgttaccaaataatggctaatgttacaaaaagttatactccagagacccaaagcttgacatttacctaatgtatgagaaaatattaccaattaacaataaagaatgatcatatttttaacctcttttacatagcctaataactcagcaaggcctcaacgtctgtgctaatttaaactgccaaatattgactgcagcaaacaagaattatattcagaatttatgagggtactgttaggagtatactgcttacaggtttagatatagtctgttagaattaaaaccaagtttagtgttcatatttacctcatgggctttatcaagcccatattacctcagcttatatatagttaccatttttaggtttttaattgtttgacacttggatgataaatgcagtcattttattctcaagtgcttaaaattaatgtaattaaaagcttagctgactacagaataggtgagggtttcttaaaaatgagatttaagggctgggcacggtggctcatgcctgtaatcccagcactttgggaggccgaggtgggcggatcacttgaggttgggagttcatgaccagcttgaccaacatgaagaaaccctgtctctattaaaaatacaaaagtagccaggcatggtggcgcatgcgtgtaatcccagctacttgggaggctgaggcaggagaattgcttgaacctgggaggcagaggttgcagtgagtcgagatggtgccattgctctcgtttgggcaacaagagtgaaactcttgtctcaaaaaaaaaaaaaaatgaggtttaagacagttttgtcattactggtgggatctggtcacacaagatagcattaaacgtgacatggcacataaaattggttaaaaaattttgttttttaattacgtaatgtaaaagcccaacaaacactttatgcaagattggaatgtatcttcaaattcagatttaataaacatgtaaagatcctctgtaaaaaaaaaaaaaaaaaaaaa

SEQ ID NO: 125 - DNA, 2196 bp, Homo sapiens
  ATDC
ctcctcacaggtgtgtctctagtcctcgtggttgcctgccccactccctgccgagacgcctgccagaaaggtcacctatcctgaaccccagcaagcctgaaacagctcagccaagcaccctgcgatggaagctgcagatgcctccaggagcaacgggtcgagcccagaagccagggatgcccggagcccgtcgggccccagtggcagcctggagaatggcaccaaggctgacggcaaggatgccaagaccaccaacgggcacggcggggaggcagctgagggcaagagcctgggcagcgccctgaagccaggggaaggtaggagcgccctgttcgcgggcaatgagtggcggcgacccatcatccagtttgtcgagtccggggacgacaagaactccaactacttcagcatggactctatggaaggcaagaggtcgccgtacgcagggctccagctgggggctgccaagaagccacccgttacctttgccgaaaagggcgacgtgcgcaagtccattttctcggagtcccggaagcccacggtgtccatcatggagcccggggagacccggcggaacagctacccccgggccgacacgggccttttttcacggtccaagtccggctccgaggaggtgctgtgcgactcctgcatcggcaacaagcagaaggcggtcaagtcctgcctggtgtgccaggcctccttctgcgagctgcatctcaagccccacctggagggcgccgccttccgagaccaccagctgctcgagcccatccgggactttgaggcccgcaagtgtcccgtgcatggcaagacgatggagctcttctgccagaccgaccagacctgcatctgctacctttgcatgttccaggagcacaagaatcatagcaccgtgacagtggaggaggccaaggccgagaaggagacggagctgtcactgcaaaaggagcagctgcagctcaagatcattgagattgaggatgaagctgagaagtggcagaaggagaaggaccgcatcaagagcttcaccaccaatgagaaggccatcctggagcagaacttccgggacctggtgcgggacctggagaagcaaaaggaggaagtgagggctgcgctggagcagcgggagcaggatgctgtggaccaagtgaaggtgatcatggatgctctggatgagagagccaaggtgctgcatgaggacaagcagacccgggagcagctgcatagcatcagcgactctgtgttgtttctgcaggaatttggtgcattgatgagcaattactctctccccccacccctgcccacctatcatgtcctgctggagggggagggcctgggacagtcactaggcaacttcaaggacgacctgctcaatgtatgcatgcgccacgttgagaagatgtgcaaggcggacctgagccgtaacttcattgagaggaaccacatggagaacggtggtgaccatcgctatgtgaacaactacacgaacagcttcgggggtgagtggagtgcaccggacaccatgaagagatactccatgtacctgacacccaaaggtggggtccggacatcataccagccctcgtctcctggccgcttcaccaaggagaccacccagaagaatttcaacaatctctatggcaccaaaggtaactacacctcccgggtctgggagtactcctccagcattcagaactctgacaatgacctgcccgtcgtccaaggcagctcctccttctccctgaaaggctatccctccctcatgcggagccaaagccccaaggcccagccccagacttggaaatctggcaagcagactatgctggtggtttaagcaaggtctgagcatccctcaagtcctgctgtggaccacacaaaggcaaggagctgaccaggaggtgtcagttccctgagagacagggccaaaggcagtgtacccttgagtctcactaccggccattctacgtcaacaaaggcaacgggattgggtccaacgaagccccatgagctcctggcggaagggtgctcaaggattggagaggagacaaaaccaggagcagcacagtggggacatctcccgtctcaacagccccaggcctatgggggctctggaaggatgggccagcttgcaggggttggggagggagacatccagcttgggctttcccctttggaataaaccattggtctgtc

SEQ ID NO: 126 - DNA, 1876 bp, Homo sapiens
  G10P1; IFI56; IFI-56; IFNAI1; RNM561; GARG-16
ttacaccattggctgctgtttagctcccttatataacactgtcttggggtttaaacgtaactgaaaatccacaagacagaatagccagatctcagaggagcctggctaagcaaaaccctgcagaacggctgcctaatttacagcaaccatgagtacaaatggtgatgatcatcaggtcaaggatagtctggagcaattgagatgtcactttacatgggagttatccattgatgacgatgaaatgcctgatttagaaaacagagtcttggatcagattgaattcctagacaccaaatacagtgtgggaatacacaacctactagcctatgtgaaacacctgaaaggccagaatgaggaagccctgaagagcttaaaagaagctgaaaacttaatgcaggaagaacatgacaaccaagcaaatgtgaggagtctggtgacctggggcaactttgcctggatgtattaccacatgggcagactggcagaagcccagacttacctggacaaggtggagaacatttgcaagaagctttcaaatcccttccgctatagaatggagtgtccagaaatagactgtgaggaaggatgggccttgctgaagtgtggaggaaagaattatgaacgggccaaggcctgctttgaaaaggtgcttgaagtggaccctgaaaaccctgaatccagcgctgggtatgcgatctctgcctatcgcctggatggctttaaattagccacaaaaaatcacaagccattttctttgcttcccctaaggcaggctgtccgcttaaatccagacaatggatatattaaggttctccttgccctgaagcttcaggatgaaggacaggaagctgaaggagaaaagtacattgaagaagctctagccaacatgtcctcacagacctatgtctttcgatatgcagccaagttttaccgaagaaaaggctctgtggataaagctcttgagttattaaaaaaggccttgcaggaaacacccacttctgtcttactgcatcaccagatagggctttgctacaaggcacaaatgatccaaatcaaggaggctacaaaagggcagcctagagggcagaacagagaaaagctagacaaaatgataagatcagccatatttcattttgaatctgcagtggaaaaaaagcccacatttgaggtggctcatctagacctggcaagaatgtatatagaagcaggcaatcacagaaaagctgaagagaattttcaaaaattgttatgcatgaaaccagtggtagaagaaacaatgcaagacatacatttccactatggtcggtttcaggaatttcaaaagaaatctgacgtcaatgcaattatccattatttaaaagctataaaaatagaacaggcatcattaacaagggataaaagtatcaattctttgaagaaattggttttaaggaaacttcggagaaaggcattagatctggaaagcttgagcctccttgggttcgtctacaaattggaaggaaatatgaatgaagccctggagtactatgagcgggccctgagactggctgctgactttgagaactctgtgagacaaggtccttaggcacccagatatcagccactttcacatttcatttcattttatgctaacatttactaatcatcttttctgcttactgttttcagaaacattataattcactgtaatgatgtaattcttgaataataaatctgacaaaatattagttgtgttcaacaattagtgaaacagaatgtgtgtatgcatgtaagaaagagaaatcatttgtatgagtgctatgtagtagagaaaaaatgttagttaactttgtaggaaataaaacattggacttacactaaaaaaaaaaaaaaaaaa

SEQ ID NO: 127 - DNA, 2347 bp, Homo sapiens
  BLOV1
ggcgtgggacgtgctgcggcgtcctagctggcttacagggcggcggcggggtgtgtgtcctctgttaagagtgctactcgcccggggttgatctgtgcatgccactcctgggtcagacggtgaggtcggcgtctgcgaggacgcggcggtggagtagaagggcagccggagacaggcccggcgccccttccgaggctagacggccccagcttcgcggggatcatggcattgctggtggaccgagtgcggggccactggcgaatcgccgccgggctcctgttcaacctgctggtgtccatctgcattgtgttcctcaacaaatggatttatgtgtaccacggcttccccaacatgagcctgaccctggtgcacttcgtggtcacctggctgggcttgtatatctgccagaagctggacatctttgcccccaaaagtctgccgccctccaggctcctcctcctggccctcagcttctgtggctttgtggtcttcactaacctttctctgcagaacaacaccataggcacctatcagctggccaaggccatgaccacgccggtgatcatagccatccagaccttctgctaccagaaaaccttctccaccagaatccagctcacgctgattcctataactttaggtgtaatcctaaattcttattacgatgtgaagtttaatttccttggaatggtgtttgctgctcttggtgttttagttacatccctttatcaagtgtgggtaggagccaaacagcatgaattacaagtgaactcaatgcagctgctgtactaccaggctccgatgtcatctgccatgttgctggttgctgtgcccttctttgagccagtgtttggagaaggaggaatatttggtccctggtcagtttctgctttgcttatggtgctgctatctggagtaatagctttcatggtgaacttatcaatttattggatcattgggaacacttcacctgtcacctataacatgttcggacacttcaagttctgcattactttattcggaggatatgttttatttaaggatccactgtccattaatcaggcccttggcattttatgtacattatttggcattctcgcctatacccactttaagctcagtgaacaggaaggaagtaggagtaaactggcacaacgtccttaattgggtttttgtggagaaaagaatgttgtcccaagaagataaaaaatattgttaagtgtgcaagttattaaaaaaaaaaaattgggccaggcacggtggctcacgcctgtaatcccagcactttgggaggccaaggccagcggatcacttgaggtcaggagttcgagaccagcctgaccaacatggagaaaccctgtctcaactaataatacaaaattagccaggcgtggtggcgcatgcctgtaatcccagctactcgggaggctgaggcaggagaatcacttgaacccgggaggcggcggttgcagtgagccgagatcgtaccattgcactccagcctgggcaacaagagcgaaactccatttcaaaaaaaaaaaattggtgacagactcaatgatggaatgatttgtcggaattaacacaaagcagattttattcatataatgacttttttttaagagtctcttttttaaaaaaacttaattctctaaaaccgaaatggttcatgcttctttttaaaaatgattgtataaaatgtatggaatggttagcctggtgtggtggtgcacacctgtaatcccagctacttgggagactgagacatgagaatcgcttgagcctgggaggcggaggttgcaatgagccaagatcgtaccactgcactccagcctgggcgacagagcaagacactgtctctctctctctctccatatatatatgtgtgtgtgtgtatatatatatatatgtgtgtgtgtgtgtgtgtatacatatatacacatatatacacacacacatacatatacatgtgtatatatataccatcccatatatatgtgggatatatatatatatatatatggatatggttatatatatgggatggtttggttggtcccagcaaagtatatgaaaattaaagttctgtgataatgacaaaggaattgctgttactgtactgcaaatatgctgtgggttctcggtgttcaaactcttctaaggaaggacacacagtagctctctgcttgctgatagatggtttcccagtgtgagatttgttattttgatcagagtattcaaatcagaatttaaatctagtgtttctattttagtttagcttcctgatttatataaatgaaatctcatttataaagtataataaagatgactgtaagacaaaatccaa

SEQ ID NO: 128 - DNA, 549 bp, Homo sapiens
  ATP5C1
ttttaagttgtttattttaagataatttacaaatatcttgctgtcttcagtaattcaaataatggaggaacagtttcttcggacaaaggcagcagtaagctaaaaacaaaatcaactggctgaattttccttctttacctgaaaaacaaagtacagaacaagtaagaaatcaaacagcattttttgggaaaataatgtcaagagataataatacatatttaagtggggtacagagaactgaatttacacaataaagtgttaccctataccagtgattctaaaattttggtctggggaacctttcatggggttcatgaggtcaaaactattttcatgataatgttattttgcctgttatattctcattctcgagtatacagtagagttttccagaggccacatgatccatgacatcacaacaaaatgaatagagacagatgaaaatctagctggcttctgctacatgaatcagacattaaggggtccagagaccataaagtgtgacaaccaccactcttcacaacctatatataatatctcaaaataatg

SEQ ID NO: 129 - DNA, 10412 bp, Homo sapiens
  TGD; ABC1; CERP; ABC-1; HDLDT1; FLJ14958
gtaattgcgagcgagagtgagtggggccgggacccgcagagccgagccgacccttctctcccgggctgcggcagggcagggcggggagctccgcgcaccaacagagccggttctcagggcgctttgctccttgttttttccccggttctgttttctccccttctccggaaggcttgtcaaggggtaggagaaagagacgcaaacacaaaagtggaaaacagttaatgaccagccacggcgtccctgctgtgagctctggccgctgccttccagggctcccgagccacacgctgggggtgctggctgagggaacatggcttgttggcctcagctgaggttgctgctgtggaagaacctcactttcagaagaagacaaacatgtcagctgctgctggaagtggcctggcctctatttatcttcctgatcctgatctctgttcggctgagctacccaccctatgaacaacatgaatgccattttccaaataaagccatgccctctgcaggaacacttccttgggttcaggggattatctgtaatgccaacaacccctgtttccgttacccgactcctggggaggctcccggagttgttggaaactttaacaaatccattgtggctcgcctgttctcagatgctcggaggcttcttttatacagccagaaagacaccagcatgaaggacatgcgcaaagttctgagaacattacagcagatcaagaaatccagctcaaacttgaagcttcaagatttcctggtggacaatgaaaccttctctgggttcctgtatcacaacctctctctcccaaagtctactgtggacaagatgctgagggctgatgtcattctccacaaggtatttttgcaaggctaccagttacatttgacaagtctgtgcaatggatcaaaatcagaagagatgattcaacttggtgaccaagaagtttctgagctttgtggcctaccaagggagaaactggctgcagcagagcgagtacttcgttccaacatggacatcctgaagccaatcctgagaacactaaactctacatctcccttcccgagcaaggagctggctgaagccacaaaaacattgctgcatagtcttgggactctggcccaggagctgttcagcatgagaagctggagtgacatgcgacaggaggtgatgtttctgaccaatgtgaacagctccagctcctccacccaaatctaccaggctgtgtctcgtattgtctgcgggcatcccgagggaggggggctgaagatcaagtctctcaactggtatgaggacaacaactacaaagccctctttggaggcaatggcactgaggaagatgctgaaaccttctatgacaactctacaactccttactgcaatgatttgatgaagaatttggagtctagtcctctttcccgcattatctggaaagctctgaagccgctgctcgttgggaagatcctgtatacacctgacactccagccacaaggcaggtcatggctgaggtgaacaagaccttccaggaactggctgtgttccatgatctggaaggcatgtgggaggaactcagccccaagatctggaccttcatggagaacagccaagaaatggaccttgtccggatgctgttggacagcagggacaatgaccacttttgggaacagcagttggatggcttagattggacagcccaagacatcgtggcgtttttggccaagcacccagaggatgtccagtccagtaatggttctgtgtacacctggagagaagctttcaacgagactaaccaggcaatccggaccatatctcgcttcatggagtgtgtcaacctgaacaagctagaacccatagcaacagaagtctggctcatcaacaagtccatggagctgctggatgagaggaagttctgggctggtattgtgttcactggaattactccaggcagcattgagctgccccatcatgtcaagtacaagatccgaatggacattgacaatgtggagaggacaaataaaatcaaggatgggtactgggaccctggtcctcgagctgacccctttgaggacatgcggtacgtctgggggggcttcgcctacttgcaggatgtggtggagcaggcaatcatcagggtgctgacgggcaccgagaagaaaactggtgtctatatgcaacagatgccctatccctgttacgttgatgacatctttctgcgggtgatgagccggtcaatgcccctcttcatgacgctggcctggatttactcagtggctgtgatcatcaagggcatcgtgtatgagaaggaggcacggctgaaagagaccatgcggatcatgggcctggacaacagcatcctctggtttagctggttcattagtagcctcattcctcttcttgtgagcgctggcctgctagtggtcatcctgaagttaggaaacctgctgccctacagtgatcccagcgtggtgtttgtcttcctgtccgtgtttgctgtggtgacaatcctgcagtgcttcctgattagcacactcttctccagagccaacctggcagcagcctgtgggggcatcatctacttcacgctgtacctgccctacgtcctgtgtgtggcatggcaggactacgtgggcttcacactcaagatcttcgctagcctgctgtctcctgtggcttttgggtttggctgtgagtactttgccctttttgaggagcagggcattggagtgcagtgggacaacctgtttgagagtcctgtggaggaagatggcttcaatctcaccacttcggtctccatgatgctgtttgacaccttcctctatggggtgatgacctggtacattgaggctgtctttccaggccagtacggaattcccaggccctggtattttccttgcaccaagtcctactggtttggcgaggaaagtgatgagaagagccaccctggttccaaccagaagagaatatcagaaatctgcatggaggaggaacccacccacttgaagctgggcgtgtccattcagaacctggtaaaagtctaccgagatgggatgaaggtggctgtcgatggcctggcactgaatttttatgagggccagatcacctccttcctgggccacaatggagcggggaagacgaccaccatgtcaatcctgaccgggttgttccccccgacctcgggcaccgcctacatcctgggaaaagacattcgctctgagatgagcaccatccggcagaacctgggggtctgtccccagcataacgtgctgtttgacatgctgactgtcgaagaacacatctggttctatgcccgcttgaaagggctctctgagaagcacgtgaaggcggagatggagcagatggccctggatgttggtttgccatcaagcaagctgaaaagcaaaacaagccagctgtcaggtggaatgcagagaaagctatctgtggccttggcctttgtcgggggatctaaggttgtcattctggatgaacccacagctggtgtggacccttactcccgcaggggaatatgggagctgctgctgaaataccgacaaggccgcaccattattctctctacacaccacatggatgaagcggacgtcctgggggacaggattgccatcatctcccatgggaagctgtgctgtgtgggctcctccctgtttctgaagaaccagctgggaacaggctactacctgaccttggtcaagaaagatgtggaatcctccctcagttcctgcagaaacagtagtagcactgtgtcatacctgaaaaaggaggacagtgtttctcagagcagttctgatgctggcctgggcagcgaccatgagagtgacacgctgaccatcgatgtctctgctatctccaacctcatcaggaagcatgtgtctgaagcccggctggtggaagacatagggcatgagctgacctatgtgctgccatatgaagctgctaaggagggagcctttgtggaactctttcatgagattgatgaccggctctcagacctgggcatttctagttatggcatctcagagacgaccctggaagaaatattcctcaaggtggccgaagagagtggggtggatgctgagacctcagatggtaccttgccagcaagacgaaacaggcgggccttcggggacaagcagagctgtcttcgcccgttcactgaagatgatgctgctgatccaaatgattctgacatagacccagaatccagagagacagacttgctcagtgggatggatggcaaagggtcctaccaggtgaaaggctggaaacttacacagcaacagtttgtggcccttttgtggaagagactgctaattgccagacggagtcggaaaggattttttgctcagattgtcttgccagctgtgtttgtctgcattgcccttgtgttcagcctgatcgtgccaccctttggcaagtaccccagcctggaacttcagccctggatgtacaacgaacagtacacatttgtcagcaatgatgctcctgaggacacgggaaccctggaactcttaaacgccctcaccaaagaccctggcttcgggacccgctgtatggaaggaaacccaatcccagacacgccctgccaggcaggggaggaagagtggaccactgccccagttccccagaccatcatggacctcttccagaatgggaactggacaatgcagaacccttcacctgcatgccagtgtagcagcgacaaaatcaagaagatgctgcctgtgtgtcccccaggggcaggggggctgcctcctccacaaagaaaacaaaacactgcagatatccttcaggacctgacaggaagaaacatttcggattatctggtgaagacgtatgtgcagatcatagccaaaagcttaaagaacaagatctgggtgaatgagtttaggtatggcggcttttccctgggtgtcagtaatactcaagcacttcctccgagtcaagaagttaatgatgccatcaaacaaatgaagaaacacctaaagctggccaaggacagttctgcagatcgatttctcaacagcttgggaagatttatgacaggactggacaccaaaaataatgtcaaggtgtggttcaataacaagggctggcatgcaatcagctctttcctgaatgtcatcaacaatgccattctccgggccaacctgcaaaagggagagaaccctagccattatggaattactgctttcaatcatcccctgaatctcaccaagcagcagctctcagaggtggctctgatgaccacatcagtggatgtccttgtgtccatctgtgtcatctttgcaatgtccttcgtcccagccagctttgtcgtattcctgatccaggagcgggtcagcaaagcaaaacacctgcagttcatcagtggagtgaagcctgtcatctactggctctctaattttgtctgggatatgtgcaattacgttgtccctgccacactggtcattatcatcttcatctgcttccagcagaagtcctatgtgtcctccaccaatctgcctgtgctagcccttctacttttgctgtatgggtggtcaatcacacctctcatgtacccagcctcctttgtgttcaagatccccagcacagcctatgtggtgctcaccagcgtgaacctcttcattggcattaatggcagcgtggccacctttgtgctggagctgttcaccgacaataagctgaataatatcaatgatatcctgaagtccgtgttcttgatcttcccacatttttgcctgggacgagggctcatcgacatggtgaaaaaccaggcaatggctgatgccctggaaaggtttggggagaatcgctttgtgtcaccattatcttgggacttggtgggacgaaacctcttcgccatggccgtggaaggggtggtgttcttcctcattactgttctgatccagtacagattcttcatcaggcccagacctgtaaatgcaaagctatctcctctgaatgatgaagatgaagatgtgaggcgggaaagacagagaattcttgatggtggaggccagaatgacatcttagaaatcaaggagttgacgaagatatatagaaggaagcggaagcctgctgttgacaggatttgcgtgggcattcctcctggtgagtgctttgggctcctgggagttaatggggctggaaaatcatcaactttcaagatgttaacaggagataccactgttaccagaggagatgctttccttaacaaaaatagtatcttatcaaacatccatgaagtacatcagaacatgggctactgccctcagtttgatgccatcacagagctgttgactgggagagaacacgtggagttctttgcccttttgagaggagtcccagagaaagaagttggcaaggttggtgagtgggcgattcggaaactgggcctcgtgaagtatggagaaaaatatgctggtaactatagtggaggcaacaaacgcaagctctctacagccatggctttgatcggcgggcctcctgtggtgtttctggatgaacccaccacaggcatggatcccaaagcccggcggttcttgtggaattgtgccctaagtgttgtcaaggaggggagatcagtagtgcttacatctcatagtatggaagaatgtgaagctctttgcactaggatggcaatcatggtcaatggaaggttcaggtgccttggcagtgtccagcatctaaaaaataggtttggagatggttatacaatagttgtacgaatagcagggtccaacccggacctgaagcctgtccaggatttctttggacttgcatttcctggaagtgttctaaaagagaaacaccggaacatgctacaataccagcttccatcttcattatcttctctggccaggatattcagcatcctctcccagagcaaaaagcgactccacatagaagactactctgtttctcagacaacacttgaccaagtatttgtgaactttgccaaggaccaaagtgatgatgaccacttaaaagacctctcattacacaaaaaccagacagtagtggacgttgcagttctcacatcttttctacaggatgagaaagtgaaagaaagctatgtatgaagaatcctgttcatacggggtggctgaaagtaaagaggaactagactttcctttgcaccatgtgaagtgttgtggagaaaagagccagaagttgatgtgggaagaagtaaactggatactgtactgatactattcaatgcaatgcaattcaatgcaatgaaaacaaaattccattacaggggcagtgcctttgtagcctatgtcttgtatggctctcaagtgaaagacttgaatttagttttttacctatacctatgtgaaactctattatggaacccaatggacatatgggtttgaactcacacttttttttttttttttgttcctgtgtattctcattggggttgcaacaataattcatcaagtaatcatggccagcgattattgatcaaaatcaaaaggtaatgcacatcctcattcactaagccatgccatgcccaggagactggtttcccggtgacacatccattgctggcaatgagtgtgccagagttattagtgccaagtttttcagaaagtttgaagcaccatggtgtgtcatgctcacttttgtgaaagctgctctgctcagagtctatcaacattgaatatcagttgacagaatggtgccatgcgtggctaacatcctgctttgattccctctgataagctgttctggtggcagtaacatgcaacaaaaatgtgggtgtctccaggcacgggaaacttggttccattgttatattgtcctatgcttcgagccatgggtctacagggtcatccttatgagactcttaaatatacttagatcctggtaagaggcaaagaatcaacagccaaactgctggggctgcaagctgctgaagccagggcatgggattaaagagattgtgcgttcaaacctagggaagcctgtgcccatttgtcctgactgtctgctaacatggtacactgcatctcaagatgtttatctgacacaagtgtattatttctggctttttgaattaatctagaaaatgaaaagatggagttgtattttgacaaaaatgtttgtactttttaatgttatttggaattttaagttctatcagtgacttctgaatccttagaatggcctctttgtagaaccctgtggtatagaggagtatggccactgccccactatttttattttcttatgtaagtttgcatatcagtcatgactagtgcctagaaagcaatgtgatggtcaggatctcatgacattatatttgagtttctttcagatcatttaggatactcttaatctcacttcatcaatcaaatattttttgagtgtatgctgtagctgaaagagtatgtacgtacgtataagactagagagatattaagtctcagtacacttcctgtgccatgttattcagctcactggtttacaaatataggttgtcttgtggttgtaggagcccactgtaacaatactgggcagcctttttttttttttttttaattgcaacaatgcaaaagccaagaaagtataagggtcacaagtctaaacaatgaattcttcaacagggaaaacagctagcttgaaaacttgctgaaaaacacaacttgtgtttatggcatttagtaccttcaaataattggctttgcagatattggataccccattaaatctgacagtctcaaatttttcatctcttcaatcactagtcaagaaaaatataaaaacaacaaatacttccatatggagcatttttcagagttttctaacccagtcttatttttctagtcagtaaacatttgtaaaaatactgtttcactaatacttactgttaactgtcttgagagaaaagaaaaatatgagagaactattgtttggggaagttcaagtgatctttcaatatcattactaacttcttccactttttccagaatttgaatattaacgctaaaggtgtaagacttcagatttcaaattaatctttctatattttttaaatttacagaatattatataacccactgctgaaaaagaaaaaaatgattgttttagaagttaaagtcaatattgattttaaatataagtaatgaaggcatatttccaataactagtgatatggcatcgttgcattttacagtatcttcaaaaatacagaatttatagaataatttctcctcatttaatatttttcaaaatcaaagttatggtttcctcattttactaaaatcgtattctaattcttcattatagtaaatctatgagcaactccttacttcggttcctctgatttcaaggccatattttaaaaaatcaaaaggcactgtgaactattttgaagaaaacacaacattttaatacagattgaaaggacctcttctgaagctagaaacaatctatagttatacatcttcattaatactgtgttaccttttaaaatagtaattttttacattttcctgtgtaaacctaattgtggtagaaatttttaccaactctatactcaatcaagcaaaatttctgtatattccctgtggaatgtacctatgtgagtttcagaaattctcaaaatacgtgttcaaaaatttctgcttttgcatctttgggacacctcagaaaacttattaacaactgtgaatatgagaaatacagaagaaaataataagccctctatacataaatgcccagcacaattcattgttaaaaaacaaccaaacctcacactactgtatttcattatctgtactgaaagcaaatgctttgtgactattaaatgttgcacatcattcattcactgtatagtaatcattgactaaagccatttgtctgtgttttcttcttgtggttgtatatatcaggtaaaatattttccaaagagccatgtgtcatgtaatactgaaccactttgatattgagacattaatttgtacccttgttattatctactagtaataatgtaatactgtagaaatattgctctaattcttttcaaaattgttgcatcccccttagaatgtttctatttccataaggatttaggtatgctattatcccttcttataccctaagatgaagctgtttttgtgctctttgttcatcattggccctcattccaagcactttacgctgtctgtaatgggatctatttttgcactggaatatctgagaattgcaaaactagacaaaagtttcacaacagatttctaagttaaatcattttcattaaaaggaaaaaagaaaaaaaattttgtatgtcaataactttatatgaagtattaaaatgcatatttctatgttgtaatataatgagtcacaaaataaagctgtgacagttctgttggtctacagaaa

SEQ ID NO: 130 - DNA, 3578 bp, Homo sapiens
  AGO3; FLJ12765; MGC86946
acttccggacgggactcccctctgtccgcgcctcacatctccccttcctctcgcctagtcctgtgccgttttccgtccgcgactcttccggcccagagctttcggagtgcggttgctcaggggaagccgtcgccgcccccgcctcggggccgagtgagagtgcccgtcgcgtcgcgccgcgtcgccccccgggccgcctccttgccgccagtggcgggctccgttctccctcgaagcactccccccagctccatgaatggaaatcggctccgcaggacccgctggggcccagcccctactcatggtgcccagaagacctggctatggcaccatgggcaaacccattaaactgctggctaactgttttcaagttgaaatcccaaagattgatgtctacctctatgaggtagatattaaaccagacaagtgtcctaggagagtgaacagggaggtggttgactcaatggttcagcattttaaagtaactatatttggagaccgtagaccagtttatgatggaaaaagaagtctttacaccgccaatccacttcctgtggcaactacaggggtagatttagacgttactttacctggggaaggtggaaaagatcgacctttcaaggtgtcaatcaaatttgtctctcgggtgagttggcacctactgcatgaagtactgacaggacggaccttgcctgagccactggaattagacaagccaatcagcactaaccctgtccatgccgttgatgtggtgctacgacatctgccctccatgaaatacacacctgtggggcgttcatttttctccgctccagaaggatatgaccaccctctgggagggggcagggaagtgtggtttggattccatcagtctgttcggcctgccatgtggaaaatgatgcttaatatcgatgtttctgccactgccttctacaaagcacaacctgtaattcagttcatgtgtgaagttcttgatattcataatattgatgagcaaccaagacctctgactgattctcatcgggtaaaattcaccaaagagataaaaggtttgaaggttgaagtgactcattgtggaacaatgagacggaaataccgtgtttgtaatgtaacaaggaggcctgccagtcatcaaacctttcctttacagttagaaaacggccaaactgtggagagaacagtagcgcagtatttcagagaaaagtatactcttcagctgaagtacccgcaccttccctgtctgcaagtcgggcaggaacagaaacacacctacctgccactagaagtctgtaatattgtggcagggcaacgatgtatcaagaagctaacagacaatcagacttccactatgatcaaggcaacagcaagatctgcaccagatagacaagaggaaattagcagattggtaagaagtgcaaattatgaaacagatccatttgttcaggagtttcaatttaaagttcgggatgaaatggctcatgtaactggacgcgtacttccagcacctatgctccagtatggaggacggaatcggacagtagcaacaccgagccatggagtatgggacatgcgagggaaacaattccacacaggagttgaaatcaaaatgtgggctatcgcttgttttgccacacagaggcagtgcagagaagaaatattgaagggtttcacagaccagctgcgtaagatttctaaggatgcagggatgcccatccagggccagccatgcttctgcaaatatgcacagggggcagacagcgtagagcccatgttccggcatctcaagaacacatattctggcctacagcttattatcgtcatcctgccggggaagacaccagtgtatgcggaagtgaaacgtgtaggagacacacttttgggtatggctacacaatgtgttcaagtcaagaatgtaataaaaacatctcctcaaactctgtcaaacttgtgcctaaagataaatgttaaactcggagggatcaataatattcttgtacctcatcaaagaccttctgtgttccagcaaccagtgatctttttgggagccgatgtcactcatccacctgctggtgatggaaagaagccttctattgctgctgttgtaggtagtatggatgcacacccaagcagatactgtgccacagtaagagttcagagaccccgacaggagatcatccaggacttggcctccatggtccgggaacttcttattcaattttataagtcaactcggttcaagcctactcgtatcatcttttatcgggatggtgtttcagaggggcagtttaggcaggtattatattatgaactactagcaattcgagaagcctgcatcagtttggagaaagactatcaacctggaataacctacattgtagttcagaagagacatcacactcgattattttgtgctgataggacagaaagggttggaagaagtggcaatatcccagctggaacaacagttgatacagacattacacacccatatgagttcgatttttacctctgtagccatgctggaatacagggtaccagtcgtccttcacactatcatgttttatgggatgataactgctttactgcagatgaacttcagctgctaacttaccagctctgccacacttacgtacgctgtacacgatctgtttctatacctgcaccagcgtattatgctcacctggtagcatttagagccagatatcatcttgtggacaaagaacatgacagtgctgaaggaagtcacgtttcaggacaaagcaatgggcgagatccacaagctcttgccaaggctgtacagattcaccaagataccttacgcacaatgtacttcgcttaaatagtccaagtatattctctgagaggaagtactgaaagatgaattgacatacaacgtatgtttccagtgaagtcaattgagtaaggacacctccagccatacagaaaccaacactgtgtgggggccaaggtctgatccttatgttaatacaaggaagattgtttacttcatcaaggaacacagcatcattatgcaatatgaaaccagccaactgctttttgtgcggtctcctataggaagtatcgcaattgttttgttttcatttcttgtagtctaacccttttaatgcctttacctcaagttgcttggcagcacaactatctttgcaaaaaaaagtaaagaaaaagtaaatgatggtttaaaaaatacacaccttcatgaataatcaaagtgatttttcagaattatgtgtgcaaaaaattaatgtgcattcatatattcttgtaaaaggtgtctgtgtatttttaaaatatatacatccatacttcatatgcatatatatctagatctggattgataatagatatatatgtgtctgttatatattttagagttcattccattggggaattttctttcccttttattctacccccactaccgcctttatttctctatttcccttgccttcatcacctacatttttttcccagtcctaccagtgacattcaaatgttgatgtatctggttcgtttgaatataaaatatggcaaactaaaaaaaaaaaaaaaaaaaaaaa

SEQ ID NO: 131 - DNA, 2116 bp, Homo sapiens
  IL-7
acatccgcggcaacgcctccttggtgtcgtccgcttccaataacccagcttgcgtcctgcacacttgtggcttccgtgcacacattaacaactcatggttctagctcccagtcgccaagcgttgccaaggcgttgagagatcatctgggaagtcttttacccagaattgctttgattcaggccagctggtttttcctgcggtgattcggaaattcgcgaattcctctggtcctcatccaggtgcgcgggaagcaggtgcccaggagagaggggataatgaagattccatgctgatgatcccaaagattgaacctgcagaccaagcgcaaagtagaaactgaaagtacactgctggcggatcctacggaagttatggaaaaggcaaagcgcagagccacgccgtagtgtgtgccgccccccttgggatggatgaaactgcagtcgcggcgtgggtaagaggaaccagctgcagagatcaccctgcccaacacagactcggcaactccgcggaagaccagggtcctgggagtgactatgggcggtgagagcttgctcctgctccagttgcggtcatcatgactacgcccgcctcccgcagaccatgttccatgtttcttttaggtatatctttggacttcctcccctgatccttgttctgttgccagtagcatcatctgattgtgatattgaaggtaaagatggcaaacaatatgagagtgttctaatggtcagcatcgatcaattattggacagcatgaaagaaattggtagcaattgcctgaataatgaatttaacttttttaaaagacatatctgtgatgctaataaggaaggtatgtttttattccgtgctgctcgcaagttgaggcaatttcttaaaatgaatagcactggtgattttgatctccacttattaaaagtttcagaaggcacaacaatactgttgaactgcactggccaggttaaaggaagaaaaccagctgccctgggtgaagcccaaccaacaaagagtttggaagaaaataaatctttaaaggaacagaaaaaactgaatgacttgtgtttcctaaagagactattacaagagataaaaacttgttggaataaaattttgatgggcactaaagaacactgaaaaatatggagtggcaatatagaaacacgaactttagctgcatcctccaagaatctatctgcttatgcagtttttcagagtggaatgcttcctagaagttactgaatgcaccatggtcaaaacggattagggcatttgagaaatgcatattgtattactagaagatgaatacaaacaatggaaactgaatgctccagtcaacaaactatttcttatatatgtgaacatttatcaatcagtataattctgtactgatttttgtaagacaatccatgtaaggtatcagttgcaataatacttctcaaacctgtttaaatatttcaagacattaaatctatgaagtatataatggtttcaaagattcaaaattgacattgctttactgtcaaaataattttatggctcactatgaatctattatactgtattaagagtgaaaattgtcttcttctgtgctggagatgttttagagttaacaatgatatatggataatgccggtgagaataagagagtcataaaccttaagtaagcaacagcataacaaggtccaagatacctaaaagagatttcaagagatttaattaatcatgaatgtgtaacacagtgccttcaataaatggtatagcaaatgttttgacatgaaaaaaggacaatttcaaaaaaataaaataaaataaaaataaattcacctagtctaaggatgctaaaccttagtactgagttacattgtcatttatatagattataacttgtctaaataagtttgcaatttgggagatatatttttaagataataatatatgtttaccttttaattaatgaaatatctgtatttaattttgacactatatctgtatataaaatattttcatacagcattacaaattgcttactttggaatacatttctcctttgataaaataaatgagctatgtattaacaaaaaaaaaaaaaaaaaaaaaaaaaaaaaaaaaaaaaaa

SEQ ID NO: 132 - DNA, 2819 bp, Homo sapiens
  MLT; MLT1; DKFZp434L132
ccggggccgaggcccgtgacggggcgggcgggagccccggcagtccggggtcgccggcgagggccatgtcgctgttgggggacccgctacaggccctgccgccctcggccgcccccacggggccgctgctcgcccctccggccggcgcgaccctcaaccgcctgcgggagccgctgctgcggaggctcagcgagctcctggatcaggcgcccgagggccggggctggaggagactggcggagctggcggggagtcgcgggcgcctccgcctcagttgcctagacctggagcagtgttctcttaaggtactggagcctgaaggaagccccagcctgtgtctgctgaagttaatgggtgaaaaaggttgcacagtcacagaattgagtgatttcctgcaggctatggaacacactgaagttcttcagcttctcagccccccaggaataaagattactgtaaacccagagtcaaaggcagtcttggctggacagtttgtgaaactgtgttgccgggcaactggacatccttttgttcaatatcagtggttcaaaatgaataaagagattccaaatggaaatacatcagagcttatttttaatgcagtgcatgtaaaagatgcaggcttttatgtctgtcgagttaataacaatttcacctttgaattcagccagtggtcacagctggatgtttgcgacatcccagagagcttccagagaagtgttgatggcgtctctgaatccaagttgcaaatctgtgttgaaccaacttcccaaaagctgatgccaggcagcacattggttttacagtgtgttgctgttggaagccctattcctcactaccagtggttcaaaaatgaattaccattaacacatgagaccaaaaagctatacatggtgccttatgtggatttggaacaccaaggaacctactggtgtcatgtatataatgatcgagacagtcaagatagcaagaaggtagaaatcatcatagatgaattaaataatcttggtcatcctgataataaagagcaaacaactgaccagcctttggcgaaggacaaggttgcccttttgataggaaatatgaattaccgggagcaccccaagctcaaagctcctttggtggatgtgtacgaattgactaacttactgagacagctggacttcaaagtggtttcactgttggatcttactgaatatgagatgcgtaatgctgtggatgagtttttactccttttagacaagggagtatatgggttattatattatgcaggacatggttatgaaaattttgggaacagcttcatggtccccgttgatgctccaaatccatataggtctgaaaattgtctgtgtgtacaaaatatactgaaattgatgcaagaaaaagaaactggacttaatgtgttcttattggatatgtgtaggaaaagaaatgactacgatgataccattccaatcttggatgcactaaaagtcaccgccaatattgtgtttggatatgccacgtgtcaaggagcagaagcttttgaaatccagcattctggattggcaaatggaatctttatgaaatttttaaaagacagattattagaagataagaaaatcactgtgttactggatgaagttgcagaagatatgggtaagtgtcaccttaccaaaggcaaacaggctctagagattcgaagtagtttatctgagaagagagcacttactgatccaatacagggaacagaatattctgctgaatctcttgtgcggaatctacagtgggccaaggctcatgaacttccagaaagtatgtgtcttaagtttgactgtggtgttcagattcaattaggatttgcagctgagttttccaatgtcatgatcatctatacaagtatagtttacaaaccaccggagataataatgtgtgatgcctacgttactgattttccacttgatctagatattgatccaaaagatgcaaataaaggcacacctgaagaaactggcagctacttggtatcaaaggatcttcccaagcattgcctctataccagactcagttcactgcaaaaattaaaggaacatctagtcttcacagtatgtttatcatatcagtactcaggattggaagatactgtagaggacaagcaggaagtgaatgttgggaaacctctcattgctaaattagacatgcatcgaggtttgggaaggaagacttgctttcaaacttgtcttatgtctaatggtccttaccagagttctgcagccacctcaggaggagcagggcattatcactcattgcaagacccattccatggtgtttaccattcacatcctggtaatccaagtaatgttacaccagcagatagctgtcattgcagccggactccagatgcatttatttcaagtttcgctcaccatgcttcatgtcattttagtagaagtaatgtgccagtagagacaactgatgaaataccatttagtttctctgacaggctcagaatttctgaaaaatgacctccttgtttttgaaagttagcataattttagatgcctgtgaaatagtactgcacttacataaagtgagacattctgaaaaggcaaatttgtatatgtagagaaagaatagtagtaactgtttcatagcaaacttcaggactttgagatgttgaaattacattatttaattacagacttcctctttctaagattttgtgaattggttgaatagttctatacaaatgaagtatggaggtgtgtatgtttatatgtatataacaaaatattttcattgtgaccactctgaagtaagagcaatgggaatggcat

SEQ ID NO: 133 - DNA, 3680 bp, Homo sapiens
  HSP105A; HSP105B; KIAA0201; NY-CO-25; DKFZp686M05240
tgagtaaatgccgcagattctggaaagttctgatcagtgcgatacataaggctgaggaagtgggacctccccttttgggtcggtagttcagcgccggcgccggtgtgcgagccgcggcagagtgaggcaggcaacccgaggtgcggagcgacctgcggaggctgagccccgctttctcccagggtttcttatcagccagccgccgctgtccccgggggagtaggaggctcctgacaggccgcggctgtctgtgtgtccttctgagtgtcagaggaacggccagaccccgcgggccggagcagaacgcggccagggcagaaagcggcggcaggagaagcaggcagggggccggaggacgcagaccgagacccgaggcggaggcggaccgcgagccggccatgtcggtggtggggttggacgtgggctcgcagagctgctacatcgcggtagcccgggccgggggcatcgagaccatcgccaatgagttcagcgaccggtgcaccccgtcagtcatatcatttggatcaaaaaatagaacaatcggagttgcagccaaaaatcagcaaatcactcatgcaaacaatacggtgtctaacttcaaaagatttcatggccgagcattcaatgaccccttcattcaaaaggagaaggaaaacttgagttacgatttggttccattgaaaaatggtggagttggaataaaggtaatgtacatgggtgaagaacatctatttagtgtggagcagataacagccatgttgttgactaagctgaaggaaactgctgaaaacagcctcaagaaaccagtaacagattgtgttatttcagtcccctccttctttacagatgctgagaggcgatctgtgttagatgctgcacagattgttggcctaaactgtttaagacttatgaatgacatgacagctgttgctttgaattacggaatttataagcaggatctcccaagcctggatgagaaacctcggatagtggtttttgttgatatgggacattcagcttttcaagtgtctgcttgtgcttttaacaagggaaaattgaaggtactgggaacagcttttgatcctttcttaggaggaaaaaacttcgatgaaaagttagtggaacatttttgtgcagaatttaaaactaagtacaagttggatgcaaaatccaaaatacgagcactcctacgtctgtatcaggaatgtgaaaaactgaaaaagctaatgagctctaacagcacagaccttccactgaatatcgaatgctttatgaatgataaagatgtttccggaaagatgaacaggtcacaatttgaagaactctgtgctgaacttctgcaaaagatagaagtacccctttattcactgttggaacaaactcatctcaaagtagaagatgtgagtgcagttgagattgttggaggcgctacacgaattccagctgtgaaggaaagaattgccaaattctttggaaaagatattagcacaacactcaatgcagatgaagcagtagccagaggatgtgcattacagtgtgcaatactttccccggcatttaaagttagagaattttccgtcacagatgcagttccttttccaatatctctgatctggaaccatgattcagaagatactgaaggtgttcatgaagtctttagtcgaaaccatgctgctcctttctccaaagttctcacctttctgagaagggggccttttgagctagaagctttctattctgatccccaaggagttccatatccagaagcaaaaataggccgctttgtagttcagaatgtttctgcacagaaagatggagaaaaatctagagtaaaagtcaaagtgcgagtcaacacccatggcattttcaccatctctacggcatctatggtggagaaagtcccaactgaggagaatgaaatgtcttctgaagctgacatggagtgtctgaatcagagaccaccagaaaacccagacactgataaaaatgtccagcaagacaacagtgaagctggaacacagccccaggtacaaactgatgctcaacaaacctcacagtctcccccttcacctgaacttacctcagaagaaaacaaaatcccagatgctgacaaagcaaatgaaaaaaaagttgaccagcctccagaagctaaaaagcccaaaataaaggtggtgaatgttgagctgcctattgaagccaacttggtctggcagttagggaaagaccttcttaacatgtatattgagacagagggtaagatgataatgcaagataaattggaaaaagaaaggaatgatgctaaaaatgcagttgaggaatatgtgtatgagttcagagacaagctgtgtggaccatatgaaaaatttatatgtgagcaggatcatcaaaattttttgagactcctcacagaaactgaagactggctgtatgaagaaggagaggaccaagctaaacaagcatatgttgacaagttggaagaattaatgaaaattggcactccagttaaagttcggtttcaggaagctgaagaacggccaaaaatgtttgaagaactaggacagaggctgcagcattatgccaagatagcagctgacttcagaaataaggatgagaaatacaaccatattgatgagtctgaaatgaaaaaagtggagaagtctgttaatgaagtgatggaatggatgaataatgtcatgaatgctcaggctaaaaagagtcttgatcaggatccagttgtacgtgctcaggaaattaaaacaaaaatcaaggaattgaacaacacatgtgaacccgttgtaacacaaccgaaaccaaaaattgaatcacccaaactggaaagaactccaaatggcccaaatattgataaaaaggaagaagatttagaagacaaaaacaattttggtgctgaacctccacatcagaatggtgaatgttaccctaatgagaaaaattctgttaatatggacttggactagataaccttaaattggcctattccttcaattaataaaatatttttgccatagtatgtgactctacataacatactgaaactatttatattttcttttttaaggatatttagaaattttgtgtattatatggaaaaagaaaaaaagcttaagtctgtagtctttatgatcctaaaagggaaaattgccttggtaactttcagattcctgtggaattgtgaattcatactaagctttctgtgcagtctcaccatttgcatcactgaggatgaaactgacttttgtcttttggagaaaaaaaactgtactgcttgttcaagagggctgtgattaaaatctttaagcatttgttcctgccaaggtagttttcttgcattttgctctccattcagcatgtgtgtgggtgtggatgtttataaacaagactaagtctgacttcataagggctttctaaaaccatttctgtccaagagaaaatgactttttgctttgatattaaaaattcaatgagtaaaacaaaagctagtcaaatgtgttagcagcatgcagaacaaaaactttaaactttctctctcactatacagtatattgtcatgtgaaagtgtggaatggaagaaatgtcgatcctgttgtaactgattgtgaacacttttatgagctttaaaataaagttcatcttatggtgtcatttctaaaaaaaaaaaaaaa

SEQ ID NO: 134 - DNA, 2897 bp, Homo sapiens
  KIAA1033
aagtcacgtgctgtgacagtagctggggtgaggccgtcgtcgccgcacgggctggttggggctgtgtctgtgggaggcgccggggtgatggcggtggagactctgtccccggactgggagtttgaccgcgttgacgacggctcgcagaaaattcatgccgaagtccaacttaagaattatgggaaatttcttgaggagtatacctctcaactgagaagaattgaggacgctctggatgactcaattggagatgtttgggatttcaatcttgatcctatagcattaaagcttttgccttatgaacagtcctctcttttggaactcataaagactgaaaacaaggtcttaaacaaagtcatcactgtttatgctgcactttgttgtgaaatcaagaaattaaaatatgaggctgaaactaaattttacaatggtctcttgttttatggagaaggagctacagatgccagcatggtggaaggtgattgccaaattcaaatggggagatttatttcattcttacaggaactgtcttgctttgttacgaggtgctatgaagtggtgatgaacgtagtccaccagttggctgccctctatatcagtaacaagattgcacccaaaattatagagacaactggagttcattttcagactatgtatgagcacttgggagaactgctaacagttttgctcaccctggatgaaattattgataatcatatcacactgaaagaccactggactatgtacaaaaggttactgaaatctgtccatcacaatccttcaaaatttggaattcaggaagaaaaattaaagccatttgaaaagttcttgctgaagctagaagggcaattactggatggaatgatattccaggcctgtatagaacaacaatttgattctctcaatggaggagtatctgtgtcaaaaaatagtacttttgctgaggaatttgcacatagtattcagtcaatttttgcaaatgtagaagccaaacttggagaaccttctgaaattgaccagagagacaagtatgttggaatttgtggactctttgtattgcactttcagatttttcgaactattgataaaaagttttataagtctttattggacatttgtaagaaggtaccagccatcactctaactgctaatattatttggtttcctgataattttctgatccagaaaataccagcagctgccaaactgctagacagaaaaagtcttcaagccattaaaatacacagggatacttttctacaacagaaagctcaatcacttaccaaagatgtacagtcttactacgtctttgtgagctcatggatgatgaaaatggaatctattttgtctaaagagcagagaatggataaatttgctgaagatctcaccaatagatgtaatgtttttatacagggcttcttgtatgcatatagtattagtaccattattaaaaccacaatgaatctctacatgtccatgcaaaagccaatgaccaaaacctcagttaaggcattgtgcaggcttgttgaacttctcaaggcaatagagcatatgttctacaggagaagcatggttgtggctgattcagtttcacatataacacagcaccttcaacatcaggctcttcattctatttctgtggccaagaaaagagtgatttctgacaaaaaatacagcgaacagcgtcttgatgtgctctctgctctagttttggctgaaaacactctaaatggaccaagcacaaagcaacggcgacttattgtttctttggcactaagtgttggcacacaaatgaaaacatttaaagatgaagaactctttccacttcaagtagtcatgaaaaaactggatcttattagtgaacttagagaacgagtccaaacacaatgtgactgttgttttttataccggcatcgagctgtcttcccaatttatttagatgatgtatatgaaaatgctgttgatgcagccagattacattacatgttcagtgctttgcgcgactgtgtacctgctatgatgcatgcaaggcatttagagtcctatgagatacttctggattgctatgacaaggaaattatggaaattttaaatgagcatttgctggacaaattatgcaaagaaatagagaaagatctgcgactttctgtgcatactcatttaaagctggatgaccgaaaccctttcaaagttggcatgaaagacctggctctttttttctctctgaatccaattcggtttttcaatcgtttcattgacattcgggcttacgtaactcactacctagacaagactttctacaatctaacaactgtagcccttcatgactgggccacttatagtgagatgagaaacttagctgctcagcgttatggactggttatgacagaggcacatcttcccagtcagactttggaacagggccttgatgttttagaaattatgagaaacattcatatatttgtgtcccgatacctctataatctcaacaatcagatttttattgaacgaacaagcaataacaagcatttgaatactattaatattcggcatattgctaattcaattcgaacacatggcacgggaattatgaatacaactaaatgggcattcaccgcttggcgtggtggcccacgcttgtaatcccagcactttgggaggctgaagcaggaggatcacctgaggttgggagttcaagaccagcctgaccaacatggagaaaccccatctctactaaaaatacaaaattagccaggcgtggtggcgggcgcctgtaatcccagctgcttgggaggctgaggcaggagaatcgcttgaacctgggaggcagaggttgcagtgagctgagattgcgccattgcactccagcttgggcagcaagagcgaaactccatctc

SEQ ID NO: 135 - DNA, 2058 bp, Homo sapiens
  CHP1
cggtgctagcgacacgggagtggcaaacgcatcctcttgccgttcccggtgtttgggccttgcctgtgacggtgggaaaagaaaatggccttgctgtgctacaaccggggctgcggtcagcgcttcgatcctgagaccaattccgacgatgcttgcacataccacccaggtgttccggtctttcacgatgcattaaagggttggtcttgctgtaagagaagaacaactgatttttctgatttcttaagcattgtaggctgtacaaaaggtagacataatagtgagaagccacctgagccagtcaaacctgaagtcaagactactgagaagaaggagctatgtgaattaaaacccaaatttcaggaacacatcattcaagcccctaagccagtagaagcaataaaaagaccaagcccagatgaaccaatgacaaatttggaattaaaaatatctgcctccctaaaacaagcacttgataaacttaaactgtcatcagggaatgaagaaaataagaaagaagaagacaatgatgaaattaagattgggacctcatgtaagaatggagggtgttcaaagacataccagggtctagagagtctagaagaagtctgtgtatatcattctggagtacctattttccatgaggggatgaaatactggagctgttgtagaagaaaaacttctgattttaatacattcttagcccaagagggctgtacaaaagggaaacacatgtggactaaaaaagatgctgggaaaaaagttgttccatgtagacatgacttgcatcagactggaggtgaagttaccatttcagtatatgctaaaaactcacttccagaacttagccgagtagaagcaaatagcacattgttaaatgtcattattgtatttgaaggagagaaggaatttgatcaaaatgtgaaattatggggtgtgattgatgtaaagcgaagttatgtaactatgactgcaacaaagattgaaatcactatgagaaaagctgaaccgatgcagtgggcaagccttgaactgcctgcagctaaaaagcaggaaaaacaaaaagatgacacaacagattgagtgggagatggaaggaaggctattacattatttccgaatttttaatactgtgtgaagtggtggcttgctgctgtaatcttttgttttgttgttgtgttactgaatgtggcatttcagggttaacattaggttcttaaaagccaaagtcagtttgtctttttgtgcctctcatctttcttttgtgttatgtaagattgattattcatttctccctactggtaggaaccatagttgtgtcctatacttgaagaggctggaaagtagcccataaccataattgcagtatttctttgtatttctctgttaagcaaagaaatattaaggaacattttttttatgtttttgtattattccataattagtaaagcaagatgaaatgtcaaattttaatcagttttttcatggatttgtgttcttacagtacttgaaaatatttaaggaagagatgaagctctgcagttttttctatgtgggatgattacttttttaaggaggattaattctgaggtagtatagtaactaaaggggaatatatgaattgtttaacaaattagaatttgtttacaactacttgaatttttaaattatgtcaaaacttacattacttgccaagcagtatgatgttataggaaacataaataagattacagaggtatcaatttggttaaaattcaccattttataagactaagcaataatcttaacaacctctttcctgaatatttaaatgtgtttgtatggtgttatgactaattgttactgatttagagactaagccctcttaaaacctttagttaaatataaaaagaaattatatatatcttgcctccctgatggaaaactatataaaattgtagacttaaaaggtttgtggaaatacattaggatatcagaaaactaaatatatggagttgctttatgactattacatgttaaataaaaatagcttaattgttaaaaaaaaaaaaaaaaaaa

SEQ ID NO: 136 - DNA, 1490 bp, Homo sapiens
  K19; CK19; K1CS; MGC15366
agatatccgcccctgacaccattcctcccttcccccctccaccggccgcgggcataaaaggcgccaggtgagggcctcgccgctcctcccgcgaatcgcagcttctgagaccagggttgctccgtccgtgctccgcctcgccatgacttcctacagctatcgccagtcgtcggccacgtcgtccttcggaggcctgggcggcggctccgtgcgttttgggccgggggtcgcctttcgcgcgcccagcattcacgggggctccggcggccgcggcgtatccgtgtcctccgcccgctttgtgtcctcgtcctcctcgggggcctacggcggcggctacggcggcgtcctgaccgcgtccgacgggctgctggcgggcaacgagaagctaaccatgcagaacctcaacgaccgcctggcctcctacctggacaaggtgcgcgccctggaggcggccaacggcgagctagaggtgaagatccgcgactggtaccagaagcaggggcctgggccctcccgcgactacagccactactacacgaccatccaggacctgcgggacaagattcttggtgccaccattgagaactccaggattgtcctgcagatcgacaatgcccgtctggctgcagatgacttccgaaccaagtttgagacggaacaggctctgcgcatgagcgtggaggccgacatcaacggcctgcgcagggtgctggatgagctgaccctggccaggaccgacctggagatgcagatcgaaggcctgaaggaagagctggcctacctgaagaagaaccatgaggaggaaatcagtacgctgaggggccaagtgggaggccaggtcagtgtggaggtggattccgctccgggcaccgatctcgccaagatcctgagtgacatgcgaagccaatatgaggtcatggccgagcagaaccggaaggatgctgaagcctggttcaccagccggactgaagaattgaaccgggaggtcgctggccacacggagcagctccagatgagcaggtccgaggttactgacctgcggcgcacccttcagggtcttgagattgagctgcagtcacagctgagcatgaaagctgccttggaagacacactggcagaaacggaggcgcgctttggagcccagctggcgcatatccaggcgctgatcagcggtattgaagcccagctgggcgatgtgcgagctgatagtgagcggcagaatcaggagtaccagcggctcatggacatcaagtcgcggctggagcaggagattgccacctaccgcagcctgctcgagggacaggaagatcactacaacaatttgtctgcctccaaggtcctctgaggcagcaggctctggggcttctgctgtcctttggagggtgtcttctgggtagagggatgggaaggaagggacccttacccccggctcttctcctgacctgccaataaaaatttatggtccaagggaaaaaaaaaaaaaaaaaaaa

SEQ ID NO: 137 - DNA, 971 bp, Homo sapiens
  HSPH1
  modified_base (676)..(676): a, c, t or g
cagtagccagaggatgtgcattacagtgtgcaatactttccccggcatttaaagttagagaattttccgtcacagatgcagttccttttccaatatctctgatctggaaccatgattcagaagatactgaaggtgttcatgaagtctttagtcgaaaccatgctgctcctttctccaaagttctcacctttctgagaagggggccttttgagctagaagctttctattctgatccccaaggagttccatatccagaagcaaaaataggccgcttgtagttcagaatgtttctgcacagaaagatggagaaaaatctagagtaaaagtcaaagtgcgagtcaacacccatggcattttcaccatctctacggcatctatggtggagaaagtcccaactgaggagaatgaaatgtcttctgaagctgacatggagtgtctgaatcagagaccaccagaaaacccagacactgataaaaatgtccagcaagacaacagtgaagctggaacacagccccaggtacaaactgatgctcaacaaacctcacagtctcccccttcacctgaacttacctcagaagaaaacaaaatcccagatgctgacaagcaaatgaaacaacaagttgagcagcctccagaagctaaaaagccaaaataaaggtggtgaatgttgagctgnctattgaagcaactggtctggcagttagggaaagacttcttagcatgttttgagacggggttagatgataatgaagattaatgacagaaggatgagctaaaatgcgtggggaatgtgttgagtcgaaacaggggttggccttgaaattttggggcggggtcaattttgagaaccctagaagaacggggttaaggagggcacataagctttttaggggaatggactgctaagtgggtgaagaaagcgattgaaaacgggttcaaggaaaagaaaatggtagagcggagacgcgaat

SEQ ID NO: 138 - DNA, 834 bp, Homo sapiens
  POLQ
  modified_base (591)..(591): a, c, t or g
  modified_base (717)..(717): a, c, t or g
gtattttcattctgtttctctgggtcattctttctgtaccgatcatttcctcgtggacatctccaaccatcatttgcccatcttcccttccaccggggagagtaactatctctgtcaattctaccaaatgatgaactcttactttttgttctacatcttgagggggacctagaatgagatctggacctagaccactttctggttctcctttctctctctctcctctgcccatctctatcactttctcgttctctgctctgggacctggatttttctccctggggaagaatctttcactcttggctgagatcttttgttctctctagaagtttctcttcttggggacagtgattcagatcttctgctttccctagtagtatccctttttggagaccgagactgagattgcctcctttctcttgcaatatccttttttggggactgagaacgggattttttccggcctctggctgactcattcttaggagatggtgattgagacttcctgctttctttcccagtttctcttctgggagatggagactggggccgcttcttttcttgtggagtgtcttttgtgggtgaccaagntgtagatggagaatgaaatctagatcttcgagtacgagggctcttggttttatctatggtatctttttgggctctcagatggttgagaaacaggttcaaccttctcatccgcaagatcagaagacnggatattattgtcacgacagtgtgtcacagcactttcattcatttggtgaagatcagcatttacagatggttcacctcagattcattttgtcactgaaaatgatcacacttcatagg

SEQ ID NO: 139 - DNA, 2664 bp, Homo sapiens
  NFE1B; MGC2306
gtgagcgccaggaaggtagcgaggccagcgtcgccccgggactcgctgctcaagtctgtctattgcctgccgccacatccatcctagcagggccccgtcgcccaccaggcggacaaaagcggtccgctgaacaccatgcggccgctcggcgtgccgcccaggctctgctggtgagcgccgccaccccgcgcccaggtcccgcgagcccgcctgccgcgcacctcgccctgctcccagctctactccaggccccgtccgcccgggggcgccgcccaccgcgcctcgctcgggccgttgccgtctgcacccagaccctgagccgccgccgccggccatggaggtggcgccggagcagccgcgctggatggcgcacccggccgtgctgaatgcgcagcaccccgactcacaccacccgggcctggcgcacaactacatggaacccgcgcagctgctgcctccagacgaggtggacgtcttcttcaatcacctcgactcgcagggcaacccctactatgccaaccccgctcacgcgcgggcgcgcgtctcctacagccccgcgcacgcccgcctgaccggaggccagatgtgccgcccacacttgttgcacagcccgggtttgccctggctggacgggggcaaagcagccctctctgccgctgcggcccaccaccacaacccctggaccgtgagccccttctccaagacgccactgcacccctcagctgctggaggccctggaggcccactctctgtgtacccaggggctgggggtgggagcgggggaggcagcgggagctcagtggcctccctcacccctacagcaacccactctggctcccaccttttcggcttcccacccacgccacccaaagaagtgtctcctgaccctagcaccacgggggctgcgtctccagcctcatcttccgcggggggtagtgcagcccgaggagaggacaaggacggcgtcaagtaccaggtgtcactgacggagagcatgaagatggaaagtggcagtcccctgcgcccaggcctagctactatgggcacccagcctgctacacaccaccccatccccacctacccctcctatgtgccggcggctgcccacgactacagcagcggactcttccaccccggaggcttcctggggggaccggcctccagcttcacccctaagcagcgcagcaaggctcgttcctgttcagaaggccgggagtgtgtcaactgtggggccacagccacccctctctggcggcgggacggcaccggccactacctgtgcaatgcctgtggcctctaccacaagatgaatgggcagaaccgaccactcatcaagcccaagcgaagactgtcggccgccagaagagccggcacctgttgtgcaaattgtcagacgacaaccaccaccttatggcgccgaaacgccaacggggaccctgtctgcaacgcctgtggcctctactacaagctgcacaatgttaacaggccactgaccatgaagaaggaagggatccagactcggaaccggaagatgtccaacaagtccaagaagagcaagaaaggggcggagtgcttcgaggagctgtcaaagtgcatgcaggagaagtcatcccccttcagtgcagctgccctggctggacacatggcacctgtgggccacctcccgcccttcagccactccggacacatcctgcccactccgacgcccatccacccctcctccagcctctccttcggccacccccacccgtccagcatggtgaccgccatgggctagggaacagatggacgtcgaggaccgggcactcccgggatgggtggaccaaacccttagcagcccagcatttcccgaaggccgacaccactcctgccagcccggctcggcccagcaccccctctcctggagggcgcccagcagcctgccagcagttactgtgaatgttccccaccgctgagaggctgcctccgcacctgaccgctgcccaggtggggtttcctgcatggacagttgtttggagaacaacaaggacaactttatgtagagaaaaggaggggacgggacagacgaaggcaaccatttttagaaggaaaaaggattaggcaaaaataatttattttgctcttgtttctaacaaggacttggagacttggtggtctgagctgtcccaagtcctccggttcttcctcgggattggcgggtccacttgccagggctctgggggcagatttgtggggacctcagcctgcaccctcttctcctctggcttccctctctgaaatagccgaactccaggctgggctgagccaaagccagagtggccacggcccagggagggtgagctggtgcctgctttgacgggccaggccctggagggcagagacaatcacgggcggtcctgcacagattcccaggccagggctgggtcacaggaaggaaacaacattttcttgaaaggggaaacgtctcccagatcgctcccttggctttgaggccgaagctgctgtgactgtgtccccttactgagcgcaagccacagcctgtcttgtcaggtggaccctgtaaatacatcctttttctgctaacccttcaaccccctcgcctcctactctgagacaaaaaaaaaaaaaaaaaaaaaaaaaaaaaaaaaaaaaaaaaaaaaaaaa

SEQ ID NO: 140 - DNA, 1863 bp, Homo sapiens
  ASS; CTLN1
gccggcgcgcccctgggagggtgagccggcgccgggcccaggcccggacctggtgggaggcggggggaggtggggacgaggcctggggaggcgggccccgcccatctgcaggtggctgtgaacgctgagcggctccaggcgggggccgggcccgggggcggggtctgtggcgcgcgtccccgccacgtgtccccggtcaccggccctgcccccgggccctgtgcttataacctgggatgggcacccctgccagtcctgctctgccgcctgccaccgctgcccgagcccgagtggttcactgcactgtgaaaacagattccagacgccgggaactcacgcctccaatcccagacgctatgtccagcaaaggctccgtggttctggcctacagtggcggcctggacacctcgtgcatcctcgtgtggctgaaggaacaaggctatgacgtcattgcctatctggccaacattggccagaaggaagacttcgaggaagccaggaagaaggcactgaagcttggggccaaaaaggtgttcattgaggatgtcagcagggagtttgtggaggagttcatctggccggccatccagtccagcgcactgtatgaggaccgctacctcctgggcacctctcttgccaggccctgcatcgcccgcaaacaagtggaaatcgcccagcgggagggggccaagtatgtgtcccacggcgccacaggaaaggggaacgatcaggtccggtttgagctcagctgctactcactggccccccagataaaggtcattgctccctggaggatgcctgaattctacaaccggttcaagggccgcaatgacctgatggagtacgcaaagcaacacgggattcccatcccggtcactcccaagaacccgtggagcatggatgagaacctcatgcacatcagctacgaggctggaatcctggagaaccccaagaaccaagcgcctccaggtctctacacgaagacccaggacccagccaaagcccccaacacccctgacattctcgagatcgagttcaaaaaaggggtccctgtgaaggtgaccaacgtcaaggatggcaccacccaccagacctccttggagctcttcatgtacctgaacgaagtcgcgggcaagcatggcgtgggccgtattgacatcgtggagaaccgcttcattggaatgaagtcccgaggtatctacgagaccccagcaggcaccatcctttaccatgctcatttagacatcgaggccttcaccatggaccgggaagtgcgcaaaatcaaacaaggcctgggcttgaaatttgctgagctggtgtataccggtttctggcacagccctgagtgtgaatttgtccgccactgcatcgccaagtcccaggagcgagtggaagggaaagtgcaggtgtccgtcctcaagggccaggtgtacatcctcggccgggagtccccactgtctctctacaatgaggagctggtgagcatgaacgtgcagggtgattatgagccaactgatgccaccgggttcatcaacatcaattccctcaggctgaaggaatatcatcgtctccagagcaaggtcactgccaaatagacccgtgtacaatgaggagctggggcctcctcaatttgcagatcccccaagtacaggcgctaattgttgtgataatttgtaattgtgacttgttctccccggctggcagcgtagtggggctgccaggccccagctttgttccctggtccccctgaagcctgcaaacgttgtcatcgaagggaagggtggggggcagctgcggtggggagctataaaaatgacaattaaaagagacactagtcttttatttctaaaaaaaaaaaaaaaa

SEQ ID NO: 141 - DNA, 591 bp, Homo sapiens
  FCER1G
cagaacggccgatctccagcccaagatgattccagcagtggtcttgctcttactccttttggttgaacaagcagcggccctgggagagcctcagctctgctatatcctggatgccatcctgtttctgtatggaattgtcctcaccctcctctactgtcgactgaagatccaagtgcgaaaggcagctataaccagctatgagaaatcagatggtgtttacacgggcctgagcaccaggaaccaggagacttacgagactctgaagcatgagaaaccaccacagtagctttagaatagatgcggtcatattcttctttggcttctggttcttccagccctcatggttggcatcacatatgcctgcatgccattaacaccagctggccctacccctataatgatcctgtgtcctaaattaatatacaccagtggttcctcctccctgttaaagactaatgctcagatgctgtttacggatatttatattctagtctcactctcttgtcccacccttcttctcttccccattcccaactccagctaaaatatgggaagggagaacccccaataaaactgccatggactggactc

SEQ ID NO: 142 - DNA, 2152 bp, Homo sapiens
  P125; MSTP053
gtgatcggtttccggtcagtggtgtggtaccgggtacccggagacgtgtatcggacggtgggccgcagccatggccgagagaaaacctaacggtggcagcggcggcgcctccacttcctcatcgggcactaacttacttttctcctcctcggccacggagttcagcttcaatgtgcccttcatcccagtcacccaggcctccgcttctccggcctccctgctcttaccgggagaggattccacagatgttggtgaggaggacagcttccttggtcagacttctattcacacatctgccccacagacatttagttacttctctcaggtatcaagcagcagtgatccttttgggaatattggacagtcaccattaacaactgcagcaacctcagttggacaatcaggattccccaagcccctgactgctctcccttttacaactggatcccaagatgtctcgaatgcattttcaccatccatttcgaaggctcaacctggtgctccaccttcctcactgatgggaataaattcttatctgccttctcagccaagtagtctccctccttcatattttgggaaccaaccccaaggaattccccaaccaggatacaatccatatcgccatacccctggcagcagcagggctaatccttacattgcaccaccccagctgcagcagtgccaaacaccaggccctcctgctcatcctccaccttctggaccccctgttcagatgtacgagatgcctcaagttgaccatttggtgtttgtggtgcatggcattggacctgtgtgtgacttacgctttaggagcattattgagtgtgtggatgattttagggtggtttctctcaaattgctgcggacacatttcaagaaatctttagatgacgggaaagtaagcagagtggagttccttccagttcattggcatagttctttgggtggggacgccacaggtgtggacaggaatattaagaaaatcactttgccaagtattggtcgatttcgtcactttaccaatgaaactttgctagatattttattttataacagccccacctactgtcagacaattgtggaaaaagtaggaatggagataaaccatctgcatgcactctttatgagtcggaacccagacttcaaaggaggtgtctctgttgctggtcacagtttaggttctttaatattgtttgacatcctgtctaatcaaaaagatttgaatttatcaaagtgccctggacctcttgctgttgctaatggagttgtgaagcagctacattttcaggaaaagcagatgcctgaagagccaaagctgactttggatgagtcgtatgaccttgttgttgaaaatgaagaagtcctaactttgcaagaaactctggaagcacttagcctctctgaatattttagcacttttgaaaaggaaaagattgatatggagtccctgcttatgtgtacagttgatgacctgaaggaaatggggataccccttggacccagaaagaagatagctaactttgtagaacataaagcagccaaactgaaaaaagcagcatcagaaaagaaggcagtggcggccacttctacaaaaggacaagagcaaagtgcccagaagactaaagacatggcttccctcccctcagaatccaatgagccaaagaggaaacttccagttggtgcttgcgtgtcttctgtgtgtgtgaattatgaatcttttgaagttggcgccggacaggtttctgttgcttacaactcattagattttgaaccagagatattctttgccttggggtctccaattgctatgtttctcactattcgaggagttgataggatagatgagaattacagccttcctacctgtaaagggttcttcaatatttatcatccgcttgatccagtggcatatagattagaacctatgattgttccagatttggacctaaaagctgttctcattccacatcacaaaggcagaaaaagacttcatttagaattgaaagagagtctctctcgtatgggatctgatttgaagcagggttttattagctctctcaaaagtgcttggcagacattaaatgagtttgcccgtgctcatacgtcttcaacccagttgcaagaagaattggagaaggtggccaatcagatc

SEQ ID NO: 143 - DNA, 727 bp, Homo sapiens
  RPL17
tttttttccttttaattacatttattttaatgctgaatttactcccgtgccataagtttttgtttcttcagtttcttctgggatatctggggaaagaaaaatgtgttaagtttcttagagaaaaccacagtacatcttggaggacttcagcttattctggaggcaggaaacctagtcgttaaggactaagggggaaaaatacttaaatggtagaaatcaacagaaattaagttcattagatgtaaaaagaagtgtacagaatcactcaggttcttgacttaaaagaactaaatgtgatcaattactgaaaacaagcttcttagatttggggagagggcccattttgaagtggctatgtacatctaagtggggccatcagcagataatcatacgggcctgaggtactgaatataaaactaccagtttttttttttttgagacagcgtctcggctctgtcacccaggctggagtgcagtggcgcgatctcggctcactcctagttcctcctcccgggttcatgccattctcctgcctcagcgtcctgagtagctgtgactacagatacccgcgaacacgcccagcttatttttttttgacattttagtagagacgggtttcacgtggtagccagatggctcgatctcctgacctgtgatctaccactcagcctccaagtgctgggatacagaaactacattattatagtcagacaacttccaagccgat

SEQ ID NO: 144 - DNA, 958 bp, Homo sapiens
  DHX9
gcctccatggcgagttgctgtgcgtgtctctgtgtctcggtagaaggccagagtcacacacggtcctaagagctgggcaccaggaagcgaaggctgatctgaagaagacacttgaatcatgggtgacgttaaaaattttctgtatgcctggtgtggcaaaaggaagatgacccatcctatgaaattacgagcagtggggaacaaaaacaggcagaaattcatgtgtgaggttcaggtggcaggttataattacactggcatgggaaattccaccaataaaaaagatgcacaaagcaatgctgacagagactttgttacactatatggttcgaataaatgaaataaagagtgaagaagttccagctttggggtagcatctccgccccacttactgatactcctgaccactacagcaacatgctgaaggagattataccaacaaccatgggaggacctcttcctccacatctggctctcaaagcagaaaataatactgaggtacggggctctggctatggtgttcctgggccacctgggaccgaggagccaacttgaaggcttactactcagaaacggacgacgcaagaagtgcaagcgacttctagaattcagaaccgaaagtggaatttaaaatgccttgagcattcaatggcacaccctggcacttggaaagaatggctcccaaggtccgtattaaaaaccacataatcgcaccaaacgagacaagggatcaccaggagaaatattagctacacccccagagggggtccctgacatacaaacagggagctaaatcggccgacactcgcccaatcacatccacccagcggacacgaaagatcaggcagcgaccgggacacacacgagaccgcaccacagcccgggccggcaatgcaaaaagggcctcgtcgggccgccgtacccgggagacacacaagaggcagagcggtacagaaca

SEQ ID NO: 145 - DNA, 816 bp, Homo sapiens
  HBE1
caacaaaaaagagcctcaggatccagcacacattatcacaaacttagtgtccatccatcactgctgaccctctccggacctgactccacccctgagggacacaggtcagccttgaccaatgacttttaagtaccatggagaacagggggccagaacttcggcagtaaagaataaaaggccagacagagaggcagcagcacatatctgcttccgacacagctgcaatcactagcaagctctcaggcctggcatcatggtgcattttactgctgaggagaaggctgccgtcactagcctgtggagcaagatgaatgtggaagaggctggaggtgaagccttgggcagactcctcgttgtttacccctggacccagagattttttgacagctttggaaacctgtcgtctccctctgccatcctgggcaaccccaaggtcaaggcccatggcaagaaggtgctgacttcctttggagatgctattaaaaacatggacaacctcaagcccgcctttgctaagctgagtgagctgcactgtgacaagctgcatgtggatcctgagaacttcaagctcctgggtaacgtgatggtgattattctggctactcactttggcaaggagttcacccctgaagtgcaggctgcctggcagaagctggtgtctgctgtcgccattgccctggcccataagtaccactgagttctcttccagtttgcaggtgttcctgtgaccctgacaccctccttctgcacatggggactgggcttggccttgagagaaagccttctgtttaataaagtacattttcttcagtaatc

SEQ ID NO: 146 - DNA, 1877 bp, Homo sapiens
  CD33L; OBBP1; CD33L1; CDw327; SIGLEC-6
gggtctcaaagtttccgtctgctctgtgcagagggagtggagctccgagggcttgtggcttcgcagttcctcttctgtgaacagccgagatcacgcgctcctccccagccacccgttcctccccgcagtccttcccctccactcccttccccttctctgctcatgcagggagcccaggaagcctccgcctcagagatgctaccgctgctgctgcccctgctgtgggcaggggccctggctcaggagcggagattccagctggaggggccagagtcactgacggtgcaggagggtctgtgcgtcctcgtaccctgcagattgcccactacccttccagcctcgtactatggttatggctactggttcctggaaggggctgatgttccagtggccacaaacgacccagacgaagaagtgcaggaggagacccggggccgattccacctcctctgggatcccagaaggaagaactgctccctgagcatcagagatgcccggaggagggacaatgctgcatacttctttcggttgaagtccaaatggatgaaatacggttatacatcttccaagctctctgtgcgtgtgatggccctgacccacaggcccaacatctccatcccagggaccctggagtctggccatcccagcaatctgacctgctctgtgccctgggtctgtgagcaggggacgccccccatcttctcctggatgtcagctgcccccacctccctgggccccaggaccacccagtcctcggtgctcacaatcaccccacggccccaggaccacagcaccaacctcacctgtcaggtgacgttccctggagccggtgtgaccatggagagaaccatccagctcaatgtctcctatgctccacagaaagtggccatcagcatcttccaaggaaacagcgcagccttcaaaatcctgcaaaacacctcgtccctccctgtcctggagggccaggctctgcggctgctctgtgatgctgacggcaacccccctgcacacctgagctggttccagggcttccccgccctgaacgccacccccatctccaataccggggtcctggagctgcctcaagtagggtctgcagaagaaggagatttcacctgccgtgctcagcatcctctgggctccctgcaaatctctctgagtctctttgtgcattggaaaccagaaggcagggctggtggtgtcctgggagcagtctggggagctagcatcacaaccctggttttcctctgtgtttgcttcatcttcagagtgaagactagaaggaagaaagcagcccagccagtgcaaaacacggatgatgtgaaccccgtcatggtctcaggctccaggggtcatcagcaccagttccagacaggcatagtttcagaccaccctgctgaggctggccccatctcagaagatgagcaggagctccactacgctgtcctacacttccacaaggtgcaacctcaggaaccaaaggtcaccgacactgagtactcagaaatcaagatacacaagtgaggaattgtccaaagccataaccttgattggagagaacatggtacctctcagtgtattggttactagggctgccacagcaatgtaccacaaaccgagtgacataaacacagaactttattttcgtatagtttcagatgttagaggtctgagaacaaggtgttatcagggttggtcccttctaaggcctctcttgttggcttgtagatggctgtctcctccttgtgtcttcacatggtctttcctctgagtgtgtttgtgtcctaatcttctcttcttataaagacactagtcatattggattagggcctccccatgacctaatttaaataaattaactatttaaagaccctcca

SEQ ID NO: 147 - DNA, 1065 bp, Homo sapiens
  GRO2; GROb; MIP2; MIP2A; SCYB2; MGSA-b; MIP-2a; CINC-2a; MGSA beta
gaattaggcacgagagctccttgccagctctcctcctcgcacagccgctcgaaccgcctgctgagccccatggcccgcgccacgctctccgccgcccccagcaatccccggctcctgcgagtggcgctgctgctcctgctcctggtggccgccagccggcgcgcagcaggagcgcccctggccactgaactgcgctgccagtgcttgcagaccctgcagggaattcacctcaagaacatccaaagtgtgaaggtgaagtcccccggaccccactgcgcccaaaccgaagtcatagccacactcaagaatgggcagaaagcttgtctcaaccccgcatcgcccatggttaagaaaatcatcgaaaagatgctgaaaaatggcaaatccaactgaccagaaggaaggaggaagcttattggtggctgttcctgaaggagccctgccttacaggaacagaagaggaaagagagacacagctgcagaggccacctggattgcgcctaatgtgtttgagcatcacttaggagaagtcttctatttatttatttatttatttatttatttgtttgttttagaagattctatgttaatattttatgtgtaaaataaggttatgattgaatctacttgcacactctcccattatatttattgtttattttaggtcaaacccaagttagttcaatcctgattcatatttaatttgaagatagaaggtttgcagatattctctagtcatttgttaatatttcttcgtgatgacatatcacatgtcagccactgtgatagaggctgaggaatccaagaaaatggccagtaagatcaatgtgacggcagggaaatgtatgtgtgtctattttgtaactgtaaagatgaatgtcagttgttatttattgaaatgatttcacagtgtgtggtcaacatttctcatgttgaagctttaagaactaaaatgttctaaatatcccttggacattttatgtctttcttgtaagatactgccttgtttaatgttaattatgcagtgtttccctctgtgttagagcagagaggtttcgatattta

SEQ ID NO: 148 - DNA, 862 bp, Homo sapiens
  BEX2; HBEX2; HGR74-h
cttggcggtgacgcacggccctcacgtgaccgggagctgcagagctacgcagccttcggtgcagtcgtcactcgtgtctcgctaccagctccccgctgccctgcgctcggcgggctggcatccggcccgggggaaagcggaccagcccttctgcaggtctgcggggccaagtgtcccggcggcgcacctcgtggcgagaatcgggagaaggaggagactacaaggataggcccaggagtaatggagtccaaagagaaacgagcagtaaacagtctcagcatggaaaatgccaaccaagaaaatgaagaaaaggagcaagttgctaataaaggggagcccttggccctccctttggatgctggtgaatactgtgtgcctagaggaaatcgtaggcggttccgcgttaggcagcccatcctgcagtatagatgggatatgatgcataggcttggagaaccacaggcaaggatgagagaagagaatatggaaaggattggggaggaggtgagacagctgatggaaaagctgagggaaaagcagttgagtcatagtctgcgggcagtcagcactgacccccctcaccatgaccatcatgatgagttttgccttatgccctgaatcctgatggtttccctaaagttattacggaaacagacccctgctttcgaatttacatgttcatgatgtgcccttgttgtaaacctttacctgtcacttgtttacgtgggtctcctattaccagcttctaattgaatattgtgtttttgaaccagtctgtaagatttttgttagcagaagaattttacctattgcatggaaagatgctcattatagtgaagttaataaagcacctttaaaaagc

SEQ ID NO: 149 - DNA, 652 bp, Homo sapiens
cagagctcccaatcgtcttacgggcagcagtcctcctaccctggctatggccagcagccagctcccagcagcacctcgggaagttacggtagcagttctcagagcagcagctatgggcagccccagagtgggagctacagccagcagcctagctatggtggacagcagcaaagctatggacagcagcaaagctataatccccctcagggctatggacagcagaaccagtacaacagcagcagtggtggtggaggtggaggtggaggtggaggtaactatggccaagatcaatcctccatgagtagtggtggtggcagtggtggcggttatggcaatcaagaccagagtggtggaggtggcagcggtggctatggacagcaggaccgtggaggccgcggcaggggtggcagtggtggcggcggggcggcggcggtggtggttacaaccgcagcagtggtggctatgaacccagaggtcgtggaggtggccgtggaggcagaggtggcatgggcggaagtgaccgtggtggcttcaataaatttggtgtgttcaagaaggaagtgtatcttcatacatcaccactcctgaaagcagatgtgcttttccagactgatccaactgcagagatggcagctgagtcattgcctttctc

SEQ ID NO: 150 - DNA, 1140 bp, Homo sapiens
  EPI; TFI; LACI
ggcacgagcagcgactttaggctggataatagtcaaattcttacctcgctctttcactgctagtaagatcagattgcgtttctttcagttactcttcaatcgccagtttctggatctgcttctaaaagaagaagtagagaagataaatcctgtcttcaatacctggaaggaaaaacaaaataacctcaactccgtttcgaaaaaacattccaagaactttcatcagagattttacttgaacagcagtctcagcggttagcagcacaagagatgatttacacaatgaagaaagtacatgcactttgggcttctgtatgcctgctgcttaatcttgcccctgcccctcttaatgctgattctgaggaagatgaagaacacacaattatcacagatacggagttgccaccactgaaacttatgcattcattttgtgcattcaaggcggatgatggcccatgtaaagcaatcatgaaaagatttttcttcaatattttcactcgacagtgcgaagaatttatatatgggggatgtgaaggaaatcagaatcgatttgaaagtctggaagagtgcaaaaaaatgtgtacaagagataatgcaaacaggattataaagacaacattgcaacaagaaaagccagatttctgctttttggaagaagatcctggaatatgtcgaggttatattaccaggtatttttataacaatcagacaaaacagtgtgaacgtttcaagtatggtggatgcctgggcaatatgaacaattttgagacactggaagaatgcaagaacatttgtgaagatggtccgaatggtttccaggtggataattatggaacccagctcaatgctgtgaataactccctgactccgcaatcaaccaaggttccaagcctttttgttacaaaagaaggaacaaatgatggttggaagaatgcggctcatatttaccaagtctttctgaacgccttctgcattcatgcatccatgttctttctaggattggatagcatttcatgcctatgttaatatttgtgcttttggcatttccttaatatttatatgtatacgtgatgcctttgtagcatactgctaataaagttttaatatttacatgcatagtaaaaaaaaaaaaaaaaaaaa

SEQ ID NO: 151 - DNA, 1972 bp, Homo sapiens
  NPD014; DJ465N24.2.1; RP3-465N24.4
tccggacgtaggaggtggaggttgtggaattcgccgttcgaaagcagggactaaaagccccacttcgtcttacgttccgaaaggaaggcgtctgttgagcctttctctcagtcgtgagggaggcgtcgacggcgtgcggaagtcctgagttgaggcttgcgggatcctttccggagaaagcgcaggctaaagccgcaggtgaagatgtccaactacgtgaacgacatgtggccgggctcgccgcaggagaaggattcgccctcgacctcgcggtcgggcgggtccagccggctgtcgtcgcggtctaggagccgctctttttccagaagctctcggtcccattcccgcgtctcgagccggttttcgtccaggagtcggaggagcaagtccaggtcccgttcccgaaggcgccaccagcggaagtacaggcgctactcgcggtcatactcgcggagccggtcgcgatcccgcagccgccgttaccgagagaggcgctacgggttcaccaggagatactaccggtctccttcgcggtaccggtcccggtcccgtagcaggtcgcgctctcggggaaggtcgtactgcggaagggcgtacgcgatcgcgcggggacagcgctactacggctttggtcgcacagtgtacccggaggagcacagcagatggagggacagatccaggacgaggtcgcggagcagaaccccctttcgcttaagtgaaaaagatcgaatggagctgttagaaatagcaaaaaccaatgcagcgaaagctctaggaacaaccaacattgacttgccagctagtctcagaactgttccttcagccaaagaaacaagccgtggaataggtgtatcaagtaatggtgcaaagcctgaagtaagtattctaggtttgtcggaacaaaactttcagaaagccaactgtcaaatctgattagccacttatatcttagactatactttttgggaagtctagagatgtatataatgtgctaaattcaaagtagcaaatctgaagataggcaatgtcaaacccatgaaaatgggagattaatgagctttatttggccgtgcatggtgcctcatgcctgtaatgaggcagatggcttgagtccaggagttcaagactagcctgggcaatgtggcaaaaccgcgtgtttacaaaaaatacaaaaattagccaggcatggtggtgcatgcctgtagtcccagctgtttgggaggctgaggcaggaggatctttgagcctaggatgctaaggttgcagtgagccaagatggcaccattgcactctagcctgggcagcagagcgagaccctgtctcaaaaaatacatttatttttttcattttcagttaacagtgtactcttataacaccgttattagctggtactttggtgatttctattactagtttttctaagctatttacagagtgtttgtagctttcatttgcagcattatgttcccacaaattctgtactcagcatatacagtatagtttatctgctctatttctgtcttatagaaatcatgaatgtggtctgcagacattgatgaagaaaatctgttggtaattgatacatgggctaaagcatcagaggtttaatttgaagtttatgttcacacactgaaaacttagtttttttgttggtagatccatgtgcatgctagaatttgggacaggcactatttgcataaagtattaaagtcaatttttaaactaagcaaaggtacacgttgtaacggtggggcatctgtgaaaaagatgtccctttcataatatatgcaatatattccagatgttttgagagattacagaagaggaggcctgcttcacttgcagataagtttattataattctccagaaatgtgcaggatgtgcattagcaaattgcactgtacttttcactccagcctgggtgacagagcaagactcccgtctcgggggcttaaaaaaaaaaaaaaaaaa

SEQ ID NO: 152 - DNA, 1241 bp, Homo sapiens
  NN; NT; NT/N; NTS1; NMN-125
agttcactcactttcaaagccagctgaaggaaagaggaagtgctagagagagcccccttcagtgtgcttctgacttttacggacttggcttgttagaaggctgaaagatgatggcaggaatgaaaatccagcttgtatgcatgctactcctggctttcagctcctggagtctgtgctcagattcagaagaggaaatgaaagcattagaagcagatttcttgaccaatatgcatacatcaaagattagtaaagcacatgttccctcttggaagatgactctgctaaatgtttgcagtcttgtaaataatttgaacagcccagctgaggaaacaggagaagttcatgaagaggagcttgttgcaagaaggaaacttcctactgctttagatggctttagcttggaagcaatgttgacaatataccagctccacaaaatctgtcacagcagggcttttcaacactgggagttaatccaggaagatattcttgatactggaaatgacaaaaatggaaaggaagaagtcataaagagaaaaattccttatattctgaaacggcagctgtatgagaataaacccagaagaccctacatactcaaaagagattcttactattactgagagaataaatcatttatttacatgtgattgtgattcatcatcccttaattaaatatcaaattatatttgtgtgaaaatgtgacaaacacacttatctgtctcttctacaattgtggtttattgaatgtgatttttctgcactaatataaattagactaagtgttttcaaataaatctaaatcttcagcatgatgtgttgtgtataattggagtagatattaattaagtcacctgtataatgttttgtaattttgcaaaacatatcttgagttgtttaaacagtcaaaatgtttgatattttataccagcttatgagctcaaagtactacagcaaagcctagcctgcatatcattcacccaaaacaaagtaatagcgcctcttttattattttgactgaatgttttatggaattgaaagaaacatacgttcttttcaagacttcctcatgaatctctcaattataggaaaagttattgtgataaaataggaacagctgaaagattgattaatgaactattgttaattcttcctattttaatgaatgacattgaactgaattttttgtctgttaaatgaacttgatagctaataaaaagacaactagccatcaaaaaaaaaaa

SEQ ID NO: 153 - DNA, 713 bp, Homo sapiens
  P35; GFRP; HsT16933; MGC138467; MGC138469
tcccagctgcgcgtcgcagtcccgacgcgagaagggctggagtcggcgtccagcctagagcccccggtgggagccaggccgggacgcgtgcaccatgccctacctgctcatcagcacccagatccgcatggaggtgggccccactatggtgggcgatgaacagtcggatccagagctgatgcagcatctgggggcttcaaagagaagagccttgggaaacaacttttatgaatactacgtcgatgaccctccccgcatagtcctggacaagctggaacgcaggggcttccgtgtgctgagcatgacgggggtgggccagacgctggtgtggtgtctgcacaaggagtgaccttctcatgctgatttgcagacggggcacccctgtggaggggctgctgtgggccctgacctccaagctcctgcctcaccgtctgccttgctcctctcttcccaaatcatcaccgccatgggcccagccccaaagggcagtgaatggccttctctgaaaccctgcgtcaagcagtgggagagggcagtgcccggtgccctggtgctcccagctgccctcctgcttcgggcctgggccgagggccttgtgtaggccatgttcctcgggcagctgccccgggccggagctgggcactccagcggccctggcgcgtggctcctgcatagctagcccaagccaataaagggctgtgatgagtggctgc

SEQ ID NO: 154 - DNA, 508 bp, Homo sapiens
  PDK3
aacatttcgaatgctttaatcaacagacatatacaaatgaattttaaaataaaaccaaggcatcaatgaagaagatctaacatgaaagtcaccacatctcacaatgagaatccgatcagatggaagaaggcaaaagtctaaatcatagagtggcggagggaggcacgggagagacggagggctctgggactaaatcatcagggcatggccacctgatgtcttccactttcagggtcccagggccctaggtggaggtttgggacaaatatggtatttggtcacaaggagcaacagtacgatctgctgtatctggaatgggaaaggcgcacagaatcctggaaggactgaagacatcagatgctatgataacaagatggagagtacgagggcacaagagctgtaaggaggctctgtgctcttcggtgacaggcatcaatcacaccacagcaagatgtcattaaaaagttactactttagtggaagatctggagtagctacaggaaaaact

SEQ ID NO: 155 - DNA, 2357 bp, Homo sapiens
  Car3; CAIII
tccggaccctttcttcccatcctttgctcctaggattttacatgttgcctgcaaagggagtcaaacttagggggcaggcaaacaaacgagttctttccagcctctgtaaccggatcgctagagcgaaataaactcgcacaagtgtccagagatcgtagccagacagccagcctgcgcttgaacgaacttttaagtgaggctgcaagagccgccgggatgtagattttagttcgtggccaagcacaactacgacgatcctgtccctgccccaccccatccccaagaatgcatggaggaaggagagaggaagcaggtgagggccgcctgcatttctgcacgtcggcgccggttagaaaccctgcagttttgagagagaagaagaggagatggaggggccaggagccacgactcccgggagagcgcagggaggggcgtgggtgccccttcgcccacctccgcccccgtcacctcgacagctgtcccgctcttggaattcattggcttcctctacccggcctcccaaacaccaccccaatctagtttagccccccgccccaccctcgctgacctaataaggccatgcaagtgtgcgggggagctacataaaagcgcgggctcgcgccgactctgcaccacgcaggggaagagaaagcaggagccgtccagcacggaggaaggcgaccatggccaaggagtggggctacgccagtcacaacggtcctgaccactggcatgaacttttcccaaatgccaagggggaaaaccagtcgcccgttgagctgcatactaaagacatcaggcatgacccttctctgcagccatggtctgtgtcttatgatggtggctctgccaagaccatcctgaataatgggaagacctgccgagttgtatttgatgatacttatgataggtcaatgctgagagggggtcctctccctggaccctaccgacttcgccagtttcatcttcactggggctcttcggatgatcatggctctgagcacaccgtggatggagtcaagtatgcagcggagcttcatttggttcactggaacccgaagtataacacttttaaagaagccctgaagcagcgcgatgggatcgctgtgattggcatttttctgaagataggacatgagaatggcgagttccagattttccttgatgcattggacaagattaagacaaagggcaaggaggcgcccttcacaaagtttgacccatcctgcctgttcccggcatgccgggactactggacctaccagggctcattcaccacgccgccctgcgaggaatgcattgtgtggctgctgctgaaggagcccatgaccgtgagctctgaccagatggccaagctgcggagcctcctctccagtgctgagaacgagcccccagtgcctcttgtgagcaactggcgacctccacagcctatcaataacagggtggtgagagcttccttcaaatgaggctgctggatcttgccctcttcaggaaaggaaacctaccattggagagcttggttccttgcctccttctggtgctcttactccaagtctatttcatttttccacactgagcaatgaatgtgagagatgtggtcaccaagatctaagttacttgttgaaagaaagttactttcgacaagatctaatatgaaagcatagatttcacatttgatctctgtaataatcatctttcctataaaagtagcatttttggtaaagtttcaaagaagaagaaacagagatggaagagtaaagatatttttaaaatggctagctattgggcaccagtttttctgttatctaaaatttcacacaacttcatgtttttatttttatattatgagttgtccatcttaaagaaatatgagtaattctacatgtagtagaggtgtatgaagatcatataacaattaaacataagccagaaattaaaatgactatagacagcaagaattgagctaataatatgttttaactcttaacaccagcaagaagtcagtcatttattgaagttttagctactaagattacttggttttgattaccagtgaaaagaaaacacaatacaatcaggagttttcaaatttttgattcagtatttgaatttcttcttcataaatgtagttggaatttatcctagtatttttctttacctgaaggagggccatttatttttaatttcactacatttttctttgcatgattattaaaataaaaactgcctctgttgtgtttctcactggaggctggaatgaatgatcactagaacacaaaagagtgaatgatgacacttgaagtcaaagcagttgtactgatcaccagaaccaataaagacataaatggaaaacgttg

SEQ ID NO: 156 - DNA, 2383 bp, Homo sapiens
  HSP72; HSPA1; HSPA1B; HSP70-1
gctgctgcgacagtccactacctttttcgagagtgactcccgttgtcccaaggcttcccagagcgaacctgtgcggctgcaggcaccggcgcgtcgagtttccggcgtccggaaggaccgagctcttctcgcggatccagtgttccgtttccagcccccaatctcagagccgagccgacagagagcagggaaccggcatggccaaagccgcggcgatcggcatcgacctgggcaccacctactcctgcgtgggggtgttccaacacggcaaggtggagatcatcgccaacgaccagggcaaccgcaccacccccagctacgtggccttcacggacaccgagcggctcatcggggatgcggccaagaaccaggtggcgctgaacccgcagaacaccgtgtttgacgcgaagcggctgatcggccgcaagttcggcgacccggtggtgcagtcggacatgaagcactggcctttccaggtgatcaacgacggagacaagcccaaggtgcaggtgagctacaagggggacaccaaggcattctaccccgaggagatctcgtccatggtgctgaccaagatgaaggagatcgccgaggcgtacctgggctacccggtgaccaacgcggtgatcaccgtgccggcctacttcaacgactcgcagcgccaggccaccaaggatgcgggtgtgatcgcggggctcaacgtgctgcggatcatcaacgagcccacggccgccgccatcgcctacggcctggacagaacgggcaagggggagcgcaacgtgctcatctttgacctgggcgggggcaccttcgacgtgtccatcctgacgatcgacgacggcatcttcgaggtgaaggccacggccggggacacccacctgggtggggaggactttgacaacaggctggtgaaccacttcgtggaggagttcaagagaaaacacaagaaggacatcagccagaacaagcgagccgtgaggcggctgcgcaccgcctgcgagagggccaagaggaccctgtcgtccagcacccaggccagcctggagatcgactccctgtttgagggcatcgacttctacacgtccatcaccagggcgaggttcgaggagctgtgctccgacctgttccgaagcaccctggagcccgtggagaaggctctgcgcgacgccaagctggacaaggcccagattcacgacctggtcctggtcgggggctccacccgcatccccaaggtgcagaagctgctgcaggacttcttcaacgggcgcgacctgaacaagagcatcaaccccgacgaggctgtggcctacggggcggcggtgcaggcggccatcctgatgggggacaagtccgagaacgtgcaggacctgctgctgctggacgtggctcccctgtcgctggggctggagacggccggaggcgtgatgactgccctgatcaagcgcaactccaccatccccaccaagcagacgcagatcttcaccacctactccgacaaccaacccggggtgctgatccaggtgtacgagggcgagagggccatgacgaaagacaacaatctgttggggcgcttcgagctgagcggcatccctccggcccccaggggcgtgccccagatcgaggtgaccttcgacatcgatgccaacggcatcctgaacgtcacggccacggacaagagcaccggcaaggccaacaagatcaccatcaccaacgacaagggccgcctgagcaaggaggagatcgagcgcatggtgcaggaggcggagaagtacaaagcggaggacgaggtgcagcgcgagagggtgtcagccaagaacgccctggagtcctacgccttcaacatgaagagcgccgtggaggatgaggggctcaagggcaagatcagcgaggccgacaagaagaaggtgctggacaagtgtcaagaggtcatctcgtggctggacgccaacaccttggccgagaaggacgagtttgagcacaagaggaaggagctggagcaggtgtgtaaccccatcatcagcggactgtaccagggtgccggtggtcccgggcctgggggcttcggggctcagggtcccaagggagggtctgggtcaggccccaccattgaggaggtagattaggggcctttccaagattgctgtttttgttttggagcttcaagactttgcatttcctagtatttctgtttgtcagttctcaatttcctgtgtttgcaatgttgaaattttttggtgaagtactgaacttgctttttttccggtttctacatgcagagatgaatttatactgccatcttacgactatttcttctttttaatacacttaactcaggccattttttaagttggttacttcaaagtaaataaactttaaaattcaa

SEQ ID NO: 157 - DNA, 364 bp, Homo sapiens
  IL8
tgtaaacatgacttccaagctggccgtggctctcttggcagccttcctgatttctgcagctctgtgtgaaggtgcagttttgccaaggagtgctaaagaacttagatgtcagtgcataaagacatactccaaacctttccaccccaaatttatcaaagaactgagagtgattgagagtggaccacactgcgccaacacagaaattattgtaaagctttctgatggaagagagctctgtctggaccccaaggaaaactgggtgcagagggttgtggagaaggcagaggtccctgaaaacagggggatggattcataaactctcctcaaatccaagagaagcacagcaaactagtgatcatgggtc

SEQ ID NO: 158 - DNA, 3951 bp, Homo sapiens
  VIT1; FBX11; PRMT9; FLJ12673; MGC44383; UG063H01
cggccgcgcccggtgcagcaacagcagcagcagcccccgcagcagccgccgccgcagccgccccagcagcagccgccccagcagcagcctccgccgccgccgcagcagcagcagcagcagcagcctccgccgccgccaccgccgcctccgccgctgcctcaggagcggaacaacgtcggcgagcgggatgatgatgtgcctgcagatatggttgcagaagaatcaggtcctggtgcacaaaatagtccataccaacttcgtagaaaaactcttttgccgaaaagaacagcgtgtcccacaaagaacagtatggagggcgcctcaacttcaactacagaaaactttggtcatcgtgcaaaacgtgcaagagtgtctggaaaatcacaagatctatcagcagcacctgctgaacagtatcttcaggagaaactgccagatgaagtggttctaaaaatcttctcttacttgctggaacaggatctttgtagagcagcttgtgtatgtaaacgcttcagtgaacttgctaatgatccaattttgtggaaacgattatatatggaagtatttgaatatactcgccctatgatgcatcctgaacctggaaaattctaccagattaatccagaagagtatgaacatccaaatccctggaaagagagtttccagcagttgtataaaggtgcacatgtaaagccaggatttgctgaacatttctacagtaaccctgcaagatataaaggaagagaaaatatgttgtattatgatactattgaagatgcccttggtggggtacaagaggctcattttgatggacttatctttgttcattctggaatatatactgatgaatggatatatattgaatctccaatcaccatgattggtgcagcacctgggaaagtggcagacaaagttataattgaaaacactagagattcaaccttcgtttttatggaaggctctgaagatgcttatgttggatatatgacaataaggtttaaccctgatgacaaatctgcacaacaccacaatgcacaccactgcttagagattacagtaaattgtagccctattattgatcactgtatcatccgaagtacatgtacagttggttctgcagtatgtgttagtggtcaaggagcatgtcccaccatcaagcactgtaacatcagtgactgtgaaaatgttggactatatataacagatcatgcacagggaatatatgaggataatgaaatttccaataatgcgttagctgggatttgggttaaaaatcatggaaacccaattattagacggaatcatattcatcatggacgtgatgttggtgtgttcacatttgatcatggcatgggttactttgaaagttgcaatatacacagaaataggatagcaggctttgaagtaaaagcctatgctaaccctacagtggttcgatgtgaaattcaccatgggcagactggaggaatatatgtccatgaaaaaggaagaggacaattcatagagaataaaatctatgcaaacaactttgcaggtgtatggattacctcaaatagtgacccaacaataaggggaaattctatatttaatggaaatcaaggaggagtttacatctttggtgatggacgaggccttattgaaggaaatgacatttatggcaatgcattagcaggaattcaaattaggacaaacagttgtccaattgttcggcataacaaaattcatgatggccagcatggtgggatttatgtgcatgaaaagggacaaggagtaatagaagagaatgaagtttatagtaacactctagctggagtctgggtgacaactggcagcactccagtactgagaagaaaccggatacacagtggcaagcaggttggtgtttatttttatgacaatggacatggagtgctagaagacaatgatatctataatcatatgtattcaggggttcagataaggactggaagcaaccccaaaattagacgcaacaaaatctggggaggacagaatggtggaattctagtttataattctggtctaggctgtatagaagacaatgaaatatttgacaatgcaatggctggagtctggattaagacagatagtaatcctacactaagaagaaataaaatccatgatggaagagatggtggcatctgtatatttaatgggggtcgaggtctccttgaagaaaatgatattttcaggaatgctcaagcaggtgttctcatcagcactaatagtcatccaatcttaaggaaaaacagaatatttgatggatttgccgcaggtattgaaattacaaatcacgcaactgcaacactagaaggcaatcagatttttaacaaccggtttggaggcttatttttagcatctggtgttaatgtgacaatgaaagataacaaaataatgaacaatcaagatgccatagaaaaggctgttagtagaggccaatgtttatataaaatatcaagttataccagctatcccatgcatgatttctacagatgtcatacttgtaacaccacagatcgaaatgccatatgtgtgaactgcattaagaagtgccatcagggacatgatgtagagtttattagacatgataggtttttctgtgactgtggtgctggaacactgtctaatccttgtacattagctggtgagcctacacatgatacagatacactatatgactctgctccacctatagaatctaatacattgcagcacaactgaattccttccctaaagaaaaagtcctgccattgtaacatcataacttaaaacacttttttggaagaagatttaaaatatttgcccatgctacaggaagagactgtattaaaaatggatacacaaggtcagttgacactatgaagctcaagctaccaaaaagaaagtggcaatatattgactcaggatctcaaagctgggtgttttagcattactgtgtaaagacttgaagggacagaagtgaagaaaataagctgcaattttgtacagataccaacttctgaaaagctggtgtttttacaactagcattgaatgcagtccaatttgcagtagtaatcttcaatagacaagcagctttgttgctgcctttatggacatgggtaccaattgcttttgtaatatggtaaaaatgtgagctagcacttctgcgttccttttgattttttttttttaacatgtattcagattgagaaatatgattttaatgctttaatctcatgtagtttgtttttaatttcaagcaaaatcttactgtacttgaatgtgccctgttttgttagcacacctagacttgctgtaactgtactcatgtcccagtatgtacgttctttctatgaaagagaaaacactaatcttaaattatatccagcaatgtttctggtatcctttaagaaaagttaagactattatttccttcccttccctgtgcagcattcaaaatcacccctagaaaaagtgagtgttttaatgagacttcctaggaagggatgcactgtaaaacaaaagtattcttgtaactcagttttgtgaaaggtaaaaaactactatgttttaagtacactttagaaagtctcttcaaaacaaacagtcctgtatttgaactctgttcatagtttttttttgaacagtttagacaaaactgctggaaattaaaccaatttcctgcattaagctgagacaagtatatatacagccctatacagtttcatagcttttcctcccccatttatgtgtattggtgacagtgggtataaaacagcctgaaagtgtatgcatgtaccataacatctagacttaatatattgtggagtattcaataaccattatgtagaaggtagataagaattaaaagggtttaatttcctagaaagaaaatggaaaaatggtcatttttaaaaaataaagtttattagatcataaaaaaaaaaaaaaaa

SEQ ID NO: 159 - DNA, 1814 bp, Homo sapiens
  c-fos
ccaagactgagccggcggccgcggcgcagcgaacgagcagtgaccgtgctcctacccagctctgcttcacagcgcccacctgtctccgcccctcggcccctcgcccggctttgcctaaccgccacgatgatgttctcgggcttcaacgcagactacgaggcgtcatcctcccgctgcagcagcgcgtccccggccggggatagcctctcttactaccactcacccgcagactccttctccagcatgggctcgcctgtcaacgcgcaggacttctgcacggacctggccgtctccagtgccaacttcattcccacggtcactgccatctcgaccagtccggacctgcagtggctggtgcagcccgccctcgtctcctctgtggccccatcgcagaccagagcccctcaccctttcggagtccccgccccctccgctggggcttactccagggctggcgttgtgaagaccatgacaggaggccgagcgcagagcattggcaggaggggcaaggtggaacagttatctccagaagaagaagagaaaaggagaatccgaagggaaaggaataagatggctgcagccaaatgccgcaaccggaggagggagctgactgatacactccaagcggagacagaccaactagaagatgagaagtctgctttgcagaccgagattgccaacctgctgaaggagaaggaaaaactagagttcatcctggcagctcaccgacctgcctgcaagatccctgatgacctgggcttcccagaagagatgtctgtggcttcccttgatctgactgggggcctgccagaggttgccaccccggagtctgaggaggccttcaccctgcctctcctcaatgaccctgagcccaagccctcagtggaacctgtcaagagcatcagcagcatggagctgaagaccgagccctttgatgacttcctgttcccagcatcatccaggcccagtggctctgagacagcccgctccgtgccagacatggacctatctgggtccttctatgcagcagactgggagcctctgcacagtggctccctggggatggggcccatggccacagagctggagcccctgtgcactccggtggtcacctgtactcccagctgcactgcttacacgtcttccttcgtcttcacctaccccgaggctgactccttccccagctgtgcagctgcccaccgcaagggcagcagcagcaatgagccttcctctgactcgctcagctcacccacgctgctggccctgtgagggggcagggaaggggaggcagccggcacccacaagtgccactgcccgagctggtgcattacagagaggagaaacacatcttccctagagggttcctgtagacctagggaggaccttatctgtgcgtgaaacacaccaggctgtgggcctcaaggacttgaaagcatccatgtgtggactcaagtccttacctcttccggagatgtagcaaaacgcatggagtgtgtattgttcccagtgacacttcagagagctggtagttagtagcatgttgagccaggcctgggtctgtgtctcttttctctttctccttagtcttctcatagcattaactaatctattgggttcattattggaattaacctggtgctggatattttcaaattgtatctagtgcagctgattttaacaataactactgtgttcctggcaatagtgtgttctgattagaaatgaccaatattatactaagaaaagatacgactttattttctggtagatagaaataaatagctatatccatgaaaaaaaaaaaaaaaaaaaaa

SEQ ID NO: 160 - DNA, 1969 bp, Homo sapiens
  modified_base (57)..(61): a, c, t or g
ccgtccgtccgtcgtcctcctcgcttgcggggcgccgggcccgtcctcgagcccccnnnnnccgtccggccgcgtcggggcctcgccgcgctctacctacctacctggttgatcctgccagtagcatatgcttgtctcaaagattaagccatgcatgtctaagtacgcacggccggtacagtgaaactgcgaatggctcattaaatcagttatggttcctttggtcgctcgctcctctcctacttggataactgtggtaattctagagctaatacatgccgacgggcgctgacccccttcgcgggggggatgcgtgcatttatcagatcaaaaccaacccggtcagcccctctccggccccggccggggggcgggccgcggcggctttggtgactctagataacctcgggccgatcgcacgccccccgtggcggcgacgacccattcgaacgtctgccctatcaactttcgatggtagtcgccgtgcctaccatggtgaccacgggtgacggggaatcagggttcgattccggagagggagcctgagaaacggctaccacatccaaggaaggcagcaggcgcgcaaattacccactcccgacccggggaggtagtgacgaaaaataacaatacaggactctttcgaggccctgtaattggaatgagtccactttaaatcctttaacgaggatccattggagggcaagtctggtgccagcagccgcggtaattccagctccaatagcgtatattaaagttgctgcagttaaaaagctcgtagttggatcttgggagcgggcgggcggtccgccgcgaggcgagccaccgcccgtccccgccccttgcctctcggcgccccctcgatgctcttagctgagtgtcccgcggggcccgaagcgtttactttgaaaaaattagagtgttcaaagcaggcccgagccgcctggataccgcagctaggaataatggaataggaccgcggttctattttgttggttttcggaactgaggccatgattaagagggacggccgggggcattcgtattgcgccgctagaggtgaaattcttggaccggcgcaagacggaccagagcgaaagcatttgccaagaatgttttcattaatcaagaacgaaagtcggaggttcgaagacgatcagataccgtcgtagttccgaccataaacgatgccgaccggcgatgcggcggcgttattcccatgacccgccgggcagcttccgggaaaccaaagtctttgggttccggggggagtatggttgcaaagctgaaacttaaaggaattgacggaagggcaccaccaggagtggagcctgcggcttaatttgactcaacacgggaaacctcacccggcccggacacggacaggattgacagattgatagctctttctcgattccgtgggtggtggtgcatggccgttcttagttggtggagcgatttgtctggttaattccgataacgaacgagactctggcatgctaactagttacgcgacccccgagcggtcggcgtcccccaacttcttagagggacaagtggcgttcagccacccgagattgagcaataacaggtctgtgatgcccttagatgtccggggctgcacgcgcgctacactgactggctcagcgtgtgcctaccctacgccggcaggcgcgggtaacccgttgaaccccattcgtgatggggatcggggattgcaattattccccatgaacgaggaattcccagtaagtgcgggtcataagcttgcgttgattaagtccctgccctttgtacacaccgcccgtcgctactaccgattggatggtttagtgaggccctcggatcggccccgccggggtcggcccacggcctggcggagcgctgagaagacggtcgaacttgactatctagaggaagtaaaagtcgtaacaaggtttccgtaggtgaacctgcggaaggatcatta

SEQ ID NO: 161 - DNA, 740 bp, Homo sapiens
  POLQ
  modified_base (535)..(535): a, c, t or g
tctgtttctctgggtcattctttctgtaccgatcatttcctcgtggacatctccaaccatcatttgcccatcttcccttccaccggggagagtaactatctctgtcaattctaccaaatgatgaactcttactttttgttctacatcttgagggggacctagaatgagatctggacctagaccactttctggttctcctttctctctctctcctctgcccatctctatcactttctcgttctctgctctgggacctggatttttctcctggggaagaatctttcactcttggctgagatcttttgttctctctagaagtttctttttcttggggacagtgattcagatcttctgctttccctaatagtatccctttttggagaccgagactgagatgcctcctttctcttgcaatatccttttttggggactgagaacgggattttttccggcctctggctgactcattcttaggagatggtgattgagacttcctgctttctttcccagtttctcttctgggagatggagactngggccgcttcttttcttgtggagtgtctttgttgggtgaccaagttgtagatggagaatgaaatctagatcttcgagtacgaggctttttggttttaatctatggtattcttttggccttcagatggttgagaaacagttttcacccctttcatcccgcaagatccagacgacgggcatatttattttaagaaacagtgtgtcac

SEQ ID NO: 162 - DNA, 1498 bp, Homo sapiens
  IL-1; IL1F2; IL1-BETA
accaaacctcttcgaggcacaaggcacaacaggctgctctgggattctcttcagccaatcttcattgctcaagtgtctgaagcagccatggcagaagtacctgagctcgccagtgaaatgatggcttattacagtggcaatgaggatgacttgttctttgaagctgatggccctaaacagatgaagtgctccttccaggacctggacctctgccctctggatggcggcatccagctacgaatctccgaccaccactacagcaagggcttcaggcaggccgcgtcagttgttgtggccatggacaagctgaggaagatgctggttccctgcccacagaccttccaggagaatgacctgagcaccttctttcccttcatctttgaagaagaacctatcttcttcgacacatgggataacgaggcttatgtgcacgatgcacctgtacgatcactgaactgcacgctccgggactcacagcaaaaaagcttggtgatgtctggtccatatgaactgaaagctctccacctccagggacaggatatggagcaacaagtggtgttctccatgtcctttgtacaaggagaagaaagtaatgacaaaatacctgtggccttgggcctcaaggaaaagaatctgtacctgtcctgcgtgttgaaagatgataagcccactctacagctggagagtgtagatcccaaaaattacccaaagaagaagatggaaaagcgatttgtcttcaacaagatagaaatcaataacaagctggaatttgagtctgcccagttccccaactggtacatcagcacctctcaagcagaaaacatgcccgtcttcctgggagggaccaaaggcggccaggatataactgacttcaccatgcaatttgtgtcttcctaaagagagctgtacccagagagtcctgtgctgaatgtggactcaatccctagggctggcagaaagggaacagaaaggtttttgagtacggctatagcctggactttcctgttgtctacaccaatgcccaactgcctgccttagggtagtgctaagaggatctcctgtccatcagccaggacagtcagctctctcctttcagggccaatccccagcccttttgttgagccaggcctctctcacctctcctactcacttaaagcccgcctgacagaaaccacggccacatttggttctaagaaaccctctgtcattcgctcccacattctgatgagcaaccgcttccctatttatttatttatttgtttgtttgttttattcattggtctaatttattcaaagggggcaagaagtagcagtgtctgtaaaagagcctagtttttaatagctatggaatcaattcaatttggactggtgtgctctctttaaatcaagtcctttaattaagactgaaaatatataagctcagattatttaaatgggaatatttataaatgagcaaatatcatactgttcaatggttctgaaataaacttcactgaag

SEQ ID NO: 163 - DNA, 689 bp, Homo sapiens
  LARP1
  modified_base (554)..(554): a, c, t or g
ggggacaatgaagggacaggcctggagttactaggacaggcctttgtgctgagtagcaatgtatacaccatttgggctatcagaggtacccctgggcaggagcctctacatccccttccccctcctctctccatgactcttgacatcctagcttcttctaaggggggagggaaaggggggagatttttatatatatatacatatatatatatcaagttttaaattattgatagttcatctggattaccaaaatcactctgcagccctgcccgaggctagtaggctgcaaccctggtccccacccctaacctcctgctccccctcaagccaactatgcagcccacaagaaggccctgcgggcccccccattgcccagcactgtctcatagaaggctctggtggtacctctgggccccaggagcatcagccccttgatcatctggggtttgtcatcaccatattttctccctgctgttcccaccatgcccttctgccatcttctgggagaaggaaaccaaaggatctaaaactggggttagggggaaggtttcagnctctccccatcccctggccccacaccctttactccccagcccagagagacgctgcttttaccaggaaagactatcgacagatgtttattgtattatctctgaccttcatccttgaaaaaatggggaaaaagagaa

SEQ ID NO: 164 - DNA, 620 bp, Homo sapiens
  CLCN4
  modified_base (587)..(587): a, c, t or g
tggctatataaaatttaatgctgtcctcctgtgctgtgattgctagtatgaagtgcatgcttatacattacaactggatgttttgcatcctacagagaagataatggaacagatttagaatcaatttagtatttctcttgcaatccatttggagggattccaactgacaacgcatatgcctcatcctctccacagccgtatctgataagacctgagaggaaaaataagtagtaacattgggtagcctgtttggactcttgcatatgctacttgaaaatgaaagcacgcttatggcaggctgggggcataccggctatggcccatggaagtgctgagctgatcaatattgaatgcatgggcaaaagcaataaataaatgaagcaaatgccatggggatgcaaatcaatgatcgggtgagtataccctcaaaataaggatgtgtccctttgtatgggaggagacacaccgcagtactgtatgctccaatagttcatcgtgcagtcccaggatgccagtcttgcatagagaaatgattcttcacactcatcatggcagtgccctgatgtggttcagaactgatggataancagataccagctgagacaggaccagaacagacg

SEQ ID NO: 165 - DNA, 823 bp, Homo sapiens
  DHX9
ggcttttgctactccagagcaaataagcatggacctcaagaatgaattgatgtaccagtggaacaggatcatgatttgcaagcaatcttgcaggagagagagttactgcctgtgaagaaatttgaaagtgagattctggaagcaatcagccaaaattcagttgtcattattagaggggctactggatgtgggaaaaccacacaggttccccagttcattctagatgactttatccagaatgaccgagcagcagagtgtaacatcgtagtaactcagcccagaagaatcagtgcggtttctgtggcagagcgagttgcatttgaaagaggagaagagcctggaaaaagctgtggctacagcgttcgatttgagtctatacttcctcgtcctcatgccagtataatgttttgtactgtaggtgtgctcctgagaaaattagaagcaggcattcgaggaatcagtcatgtaattgtagatgaaatacatgaacagagatattaatactgacttcctttggtagtactgcgtgactgttgttcaggcttatcctgaagttcgcattgttcttatgtctgctactatagataccagcatgtttcgtgaatattttcttcaatggccccatcattgaagtttatgggaggacttacccagttcaagaatattttctggaagactgcattcagatgacccactttgttcctccaccaaaagacaaaagaagacgttcaacgatgatcgatggtgggagggaagcatggatgccacatggcctggcccggggcggacatcatgggccagaacacggtggcttgttccatga

SEQ ID NO: 166 - DNA, 2297 bp, Homo sapiens
  C3F; OACT5; nessy
aatgcgcacgccgtgggcgggccccgagccggaattgggggtgaagcgatagcgttttgcccgcattcggggcgcgcggagctggggggtccctgtggggctcccggagttaagatggcgtcctcagcggagggggacgaggggactgtggtggcgctggcgggggttctgcagtcgggtttccaggagctgagccttaacaagttggcgacgtccctgggcgcgtcagaacaggcgctgcggctgatcatctccatcttcctgggttacccctttgctttgttttatcggcattaccttttctacaaggagacctacctcatccacctcttccatacctttacaggcctctcaattgcttattttaactttggaaaccagctctaccactccctgctgtgtattgtgcttcagttcctcatccttcgactaatgggccgcaccatcactgccgtcctcactaccttttgcttccagatggcctaccttctggctggatactattacactgccaccggcaactacgatatcaagtggacaatgccacattgtgttctgactttgaagctgattggtttggctgttgactactttgacggagggaaagatcagaattccttgtcctctgagcaacagaaatatgccatacgtggtgttccttccctgctggaagttgctggtttctcctacttctatggggccttcttggtagggccccagttctcaatgaatcactacatgaagctggtgcagggagagctgattgacataccaggaaagataccaaacagcatcattcctgctctcaagcgcctgagtctgggccttttctacctagtgggctacacactgctcagcccccacatcacagaagactatctcctcactgaagactatgacaaccaccccttctggttccgctgcatgtacatgctgatctggggcaagtttgtgctgtacaaatatgtcacctgttggctggtcacagaaggagtatgcattttgacgggcctgggcttcaatggctttgaagaaaagggcaaggcaaagtgggatgcctgtgccaacatgaaggtgtggctctttgaaacaaacccccgcttcactggcaccattgcctcattcaacatcaacaccaacgcctgggtggcccgctacatcttcaaacgactcaagttccttggaaataaagaactctctcagggtctctcgttgctattcctggccctctggcacggcctgcactcaggatacctggtctgcttccagatggaattcctcattgttattgtggaaagacaggctgccaggctcattcaagagagccccaccctgagcaagctggccgccattactgtcctccagcccttctactatttggtgcaacagaccatccactggctcttcatgggttactccatgactgccttctgcctcttcacgtgggacaaatggcttaaggtgtataaatccatctatttccttggccacatcttcttcctgagcctactattcatattgccttatattcacaaagcaatggtgccaaggaaagagaagttaaagaagatggaataatccatttccctggtggcctgtgcgggactggtgcagaaactactcgtctcccttttcacagcactcctttgccccagagcagagaatggaaaagccagggaggtggaagatcgatgcttccagctgtgcctctgctgccagccaagtcttcatttggggccaaaggggaaacttttttttggagaaggcgtcttgctttgtcacccacgctggaatgcagtggcgggatctcagctcaccgcaacctccacctcctgggttcaagtgattttcctgcctcagcctcccaagtagctgggaatacaggcacgccaccatgcccagctaatttttgtattttcagtagaaacgggatttcaccacgttggccaggctggtctcgaactcctgaccgcaagtgatccacccgcctccgcctcccaaagtgctgggattacaggcgtgagccaccgtgcccggcccaaaggggaaactcttgtgggaggagcagaggggctcacatctcccctctgattcccccatgcacattgccttatctctccccatctagccaggaatctattgtgtttttcttctgccaatttactatgattgtgtatgtgccgctaccaccaccccccccatgggggggtggagaggggtgcaaggccctgcctgctccactttttctaccttggaactgtattagataaaatcacttctgtttgttcagtttttca

SEQ ID NO: 167 - DNA, 2417 bp, Homo sapiens
  PLZF; ZNF145
gcagcagagaggagttgagggcgatgagagcgggtactgcgaactgccgggcgatgctgtcgctgccgccgtgatacggagagcaacagttccccagcaacacccctccccgacacaggcacacaccccccgacaggcacgcacacccaccccacagtgcccggctcggctgcgcctcctctattggcccaggaagcccacccagccccgccacgcagagcccagaaggaaagaaagcctcatgcctgagccgaggggagcaccatggatctgacaaaaatgggcatgatccagctgcagaaccctagccaccccacggggctactgtgcaaggccaaccagatgcggctggccgggactttgtgcgatgtggtcatcatggtggacagccaggagttccacgcccaccggacggtgctggcctgcaccagcaagatgtttgagatcctcttccaccgcaatagtcaacactatactttggacttcctctcgccaaagaccttccagcagattctggagtatgcatatacagccacgctgcaagccaaggcggaggacctggatgacctgctgtatgcggccgagatcctggagatcgagtacctggaggaacagtgcctgaagatgctggagaccatccaggcctcagacgacaatgacacggaggccaccatggccgatggcggggccgaggaagaagaggaccgcaaggctcggtacctcaagaacatcttcatctcgaagcattccagcgaggagagtgggtatgccagtgtggctggacagagcctccctgggcccatggtggaccagagcccttcagtctccacttcatttggtctttcagccatgagtcccaccaaggctgcagtggacagtttgatgaccataggacagtctctcctgcagggaactcttcagccacctgcagggcccgaggagccaactctggctgggggtgggcggcaccctggggtggctgaggtgaagacggagatgatgcaggtggatgaggtgcccagccaggacagccctggggcagccgagtccagcatctcaggagggatgggggacaaggttgaggaaagaggcaaagaggggcctgggaccccgactcgaagcagcgtcatcaccagtgctagggagctacactatgggcgagaggagagtgccgagcaggtgccacccccagctgaggctggccaggcccccactggccgacctgagcacccagcacccccgcctgagaagcatctgggcatctactccgtgttgcccaaccacaaggctgacgctgtattgagcatgccgtcttccgtgacctctggcctccacgtgcagcctgccctggctgtctccatggacttcagcacctatggggggctgctgccccagggcttcatccagagggagctgttcagcaagctgggggagctggctgtgggcatgaagtcagagagccggaccatcggagagcagtgcagcgtgtgtggggtcgagcttcctgataacgaggctgtggagcagcacaggaagctgcacagtgggatgaagacgtacgggtgcgagctctgcgggaagcggttcctggatagtttgcggctgagaatgcacttactggctcattcagcgggtgccaaagcctttgtctgtgatcagtgcggtgcacagttttcgaaggaggatgccctggagacacacaggcagacccatactggcactgacatggccgtcttctgtctgctgtgtgggaagcgcttccaggcgcagagcgcactgcagcagcacatggaggtccacgcgggcgtgcgcagctacatctgcagtgagtgcaaccgcaccttccccagccacacggctctcaaacgccacctgcgctcacatacaggcgaccacccctacgagtgtgagttctgtggcagctgcttccgggatgagagcacactcaagagccacaaacgcatccacacgggtgagaaaccctacgagtgcaatggctgtggcaagaagttcagcctcaagcatcagctggagacgcactatagggtgcacacaggtgagaagccctttgagtgtaagctctgccaccagcgctcccgggactactcggccatgatcaagcacctgagaacgcacaacggcgcctcgccctaccagtgcaccatctgcacagagtactgccccagcctctcctccatgcagaagcacatgaagggccacaagcccgaggagatcccgcccgactggaggatagagaagacgtacctctacctgtgctatgtgtgaagggaggcccgcggcggtggagccgagcggggagccaggaaagaagagttggagtgagatgaaggaaggactatgacaaataaaaaaggaaaagaaaaaaaaaaacagaaggaaaaggaaaaaaaaaaaaa

SEQ ID NO: 168 - DNA, 1327 bp, Homo sapiens
  NUP160
ggcgggaagatggcggcggcgggaaccctggaacggagcttcgtggagctaagcggagctgagcgcgaaaggccgaggcactttcgggaattcacagtctgcagcattgggactgcaaatgccgtggctggcgccgtaaaatacagtgaaagcgcgggaggcttttactacgtggagagtggcaagttgttctccgtaaccagaaacaggttcattcattggaagacctctggagatacattggagctgatggaggagtcactggacataaatctgttgaataatgccattcgcctaaaattccaaaattgcagtgttttacctggaggggtttatgtctctgagactcagaatcgtgtgataatcttgatgttaaccaatcaaacagtgcacaggttacttttaccacacccctcccggatgtataggagtgtaagttggctaagtgcaatatcttttatttcccaaattactctgggtgtcacaaatgtagtgctggagcgatgtcttttggaattgaaggaaatttggattctcgttatccctcaccaagcatactttgatagctaccgcttaaaatgatcaggcatacattttaagttgagaattagttttcattaagaagaatagctttcttaaacttgacagttttttactttaaaaacttttttagcaatagagaggaactgagcaaaattctggttattttgatttaatagatttttctttttaattactcaacaggagttggtagttgacagtcagatgcagtcaatattcactgacattggaaaagttgatttcacagatccttgcaactatcagttaattccagcagtacctggaatatctcctaattccaccgcctctacagcctggctcagcagtgatggggaggccctgtttgccttaccatgtgcttctgggggaatctttgttcttaagctacctccttatgacatacctggtaagaatgggaactgagcatggatttaactttaaacaaggaatgttaacattgaaacagttcaacctcgtcatccaatgcagggattgcatctctactgccccggaactggtcattcattattgcttgcctaatgagtccctaatgctttacttttatacagtggataaggaactataaagcatattggagcacggaaaaacaaatagacaagtataagacagcctattctaaatcttgcagtagagatgggttgcctaattgtctgccctgagatggaggcattataacattataattaaattaattgaaacaaagacattaaataccctgcaccaagttaaaaaaaaaaaaaaaaaa

SEQ ID NO: 169 - DNA, 1085 bp, Homo sapiens
  CSH1
  modified_base (26)..(26): a, c, t or g
  modified_base (28)..(28): a, c, t or g
  modified_base (36)..(37): a, c, t or g
  modified_base (39)..(39): a, c, t or g
  modified_base (93)..(93): a, c, t or g
gatccgccgccgaggattcagcdkcnbnycccttgnnynccctcgcttcccgacgttccgtkccvccctgcccgccttctcccgccaccgcynccgccgccttccgcagccgtttccaccgaggaaaaggaatcgtatcgtatgtmcgctatccagaacctccactctttcgacccctttgctgatgcaagtaagggtgatgacctgcttcctgctggcactgaggattatatccatataagaattcaacagagaaacggcaggaagacccttactactgtccaagggatcgctgatgattacgataaaaagaaactagtgaaggcgtttaagaaaaagtttgcctgcaatggtactgtaattgagcatccggaatatggagaagtaattcagctacagggtgaccaacgcaagaacatatgccagttcctcgtagagattggactggctaaggacgatcagctgaaggttcatgggttttaagtgcttgtggctcactgaagcttaagtgaggatttccttgcaatgagtagaatttcccttctctcccttgtcacaggtttaaaaacctcacagcttgtataatgtaaccatttggggtccgcttttaacttggactagtgtaactccttcatgcaataaactgaaaagagccatgctgtctagtcttgaagtccctcatttaaacagaggtcaagcaataggcgcctggcagtgtcaagcctgaaaccaagcaataccgtcatgtttcagccaagcccagagccctaagattacaaacaactatggccggaacctcctcagctctccctctgcagagttccctaccctaagagaatgttaccacctgaacagtcctcggtgaatctgagaggagaggatggggtaaggcagaagcaccagctgtwctactagaagggagcttttggtggtagatcccttggtgtctccacctgactaggtggacagagctcaaagaggcctcttaccgctagcgaggtgataggacawctggcttgcamaaaggtytgttcgacagamatatcctagctaagggakktcaaacwyagaatttaagcaacctt

SEQ ID NO: 170 - DNA, 10863 bp, Homo sapiens
  BPTF; FAC1; NURF301
cgccccccctgcgcccgcccctcccccttcgctttccttctccccccgcctcggctccgacatgaggggccggcggggcaggccgcccaagcagcccgcggctcccgctgcggagcgctgcgccccggccccgccgccaccgccgccgccgcccacgtccggacccatcggggggctccgctcgcggcaccgcggcagcagccggggcaggtgggccgccgcccaggctgaggtggcgcccaagacgcggctgagctcgcccagggggggcagcagtagccggaggaagccgccgccgccgccgccggccccccccagcaccagcgccccgggccggggggggcgaggaggcgggggcggcaggacggggggcgggggcggcggcggccacctggcccggaccaccgcggcccggagggccgtcaacaaagtggtgtacgatgaccacgagagcgaggaggaggaggaagaggaggacatggtctccgaggaggaggaggaggaggacggcgacgccgaggagacccaggattctgaggacgacgaggaggatgagatggaagaggacgacgatgactccgattatccggaggagatggaagacgacgacgacgacgccagttactgcacggaaagcagcttcaggagccatagtacctacagcagcactccaggtaggcgaaaaccaagagtacatcggcctcgttctcctatattggaagaaaaagacatcccgccccttgaatttcccaagtcctctgaggatttaatggtgcctaatgagcatataatgaatgtcattgccatttacgaggtactgcggaactttggcactgttttgagattatctccttttcgctttgaggacttttgtgcagctctggtgagccaagagcagtgcacactcatggcagagatgcatgttgtgcttttgaaagcagttctgcgtgaagaagacacttccaatactacctttggacctgctgatctgaaagatagcgttaattccacactgtatttcatagatgggatgacgtggccagaggtgctgcgggtgtactgtgagagtgataaggagtaccatcacgttcttccttaccaagaggcagaggactacccatatggaccagtagagaacaagatcaaagttctacagtttctagtcgatcagtttcttacaacaaatattgctcgagaggaattgatgtctgaaggggtgatacagtatgatgaccattgtagggtttgtcacaaacttggggatttgctttgctgtgagacatgttcagcagtataccatttggaatgtgtgaagccacctcttgaggaggtgccagaggacgagtggcagtgtgaagtctgtgtagcacacaaggtgcctggtgtgactgactgtgttgctgaaatccaaaaaaataaaccatatattcgacatgaacctattggatatgatagaagtcggaggaaatactggttcttgaaccgaagactcataatagaagaagatacagaaaatgaaaatgaaaagaaaatttggtattacagcacaaaggtccaacttgcagaattaattgactgtctagacaaagattattgggaagcagaactctgcaaaattctagaagaaatgcgtgaagaaatccaccgacacatggacataactgaagacctgaccaataaggctcggggcagtaacaaatcctttctggcggcagctaatgaagaaattttggaatccataagagccaaaaagggagacattgataatgttaaaagcccagaagaaacagaaaaagacaagaatgagactgagaatgactctaaagatgctgagaaaaacagagaagaatttgaagaccagtcccttgaaaaagacagtgacgacaaaacaccagatgatgaccctgagcaaggaaaatctgaggagccaacagaagttggggataaaggtaactctgtgtcagcaaatcttggcgacaacacaacaaatgcaacttcagaagagactagtccctctgaagggaggagccctgtggggtgtctctcagaaacccccgatagcagcaacatggcagagaagaaggtggcatctgagctcccccaggatgtgccagaagaacctaacaagacatgtgagagcagtaacactagtgctaccactacctccatccagcctaatctggaaaacagtaacagcagcagtgaactaaattcttcccagagtgaatctgctaaggcagctgatgatcctgaaaatggagaaagagaatctcatacacctgtctctattcaggaagagatagtaggtgatttcaaatcggagaagtccaacggggagctaagtgaatctcctggagctggaaaaggagcatctggctcaactcgaatcatcaccagattgcggaatccagatagcaaacttagtcagctgaagagccagcaggtggcagccgctgcacatgaagcaaataaattatttaaggagggcaaagaggtactggtagttaactctcaaggagaaatttcacggttgagcaccaaaaaggaagtgatcatgaaaggaaatatcaacaattattttaaattgggtcaagaagggaagtatcgcgtctaccacaatcaatactccaccaattcatttgctttgaataagcaccagcacagagaagaccatgataagagaaggcatcttgcacataagttctgtctgactccagcaggagagttcaaatggaacggttctgtccatgggtccaaagttcttaccatatctactctgagactgactatcacccaattagaaaacaacatcccttcatcctttcttcatcccaactgggcatcacatagggcaaattggatcaaggcagttcagatgtgtagcaaacccagagaatttgcattggctttagccattttggagtgtgcagttaaaccagttgtgatgctaccaatatggcgagaatctttaggacataccaggttacaccggatgacatcaattgaaagagaagaaaaggagaaagtcaaaaaaaaagagaagaaacaggaagaagaagaaacgatgcagcaagcgacatgggtaaaatacacatttccagttaagcatcaggtttggaaacaaaaaggtgaagagtacagagtgacaggatatggtggttggagctggattagtaaaactcatgtttataggtttgttcctaaattgccaggcaatactaatgtgaattacagaaagtcgttagaaggaaccaaaaataatatggatgaaaatatggatgagtcagataaaagaaaatgttcacgaagtccaaaaaaaataaaaatagagcctgattctgaaaaagatgaggtaaaaggttcagatgctgcaaaaggagcagaccaaaatgaaatggatatctcaaagattactgagaagaaggaccaagatgtgaaggagctcttagattctgacagtgataaaccctgcaaggaagaaccaatggaagtagacgatgacatgaaaacagagtcacatgtaaattgtcaggagagttctcaagtagatgtggtcaatgttagtgagggttttcatctaaggactagttacaaaaagaaaacaaaatcatccaaactagatggacttcttgaaaggagaattaaacagtttacactggaagaaaaacagcgactcgaaaaaatcaagttggagggtggaattaagggtataggaaagacttctacaaattcttcaaaaaatctctctgaatcaccagtaataacgaaagcaaaagaagggtgtcagagtgactcgatgagacaagaacagagcccaaatgcaaataatgatcaacctgaggacttgattcagggatgttcagaaagtgattcctcagttcttagaatgagtgatcctagtcataccacaaacaaactttatccaaaagatcgagtgttagatgatgtctccattcggagcccagaaacaaaatgtccgaaacaaaattccattgaaaatgacatagaagaaaaagtctctgaccttgccagtagaggccaggaacccagtaagagtaaaacaaaaggaaatgattttttcatcgatgactctaaactagccagtgcagatgatattggtactttgatctgtaagaacaaaaaaccgctcatacaggaggaaagtgacaccattgtttcttcttccaagagtgctttacattcatcagtgcctaaaagtaccaatgacagagatgccacacctctgtcaagagcaatggactttgaaggaaaactgggatgtgactctgaatctaatagcactttggaaaatagttctgataccgtgtctattcaggatagcagtgaagaagatatgattgttcagaatagcaatgaaagcatttctgaacagttcagaactcgagaacaagatgttgaagtcttggagccgttaaagtgtgagttggtttctggtgagtccactggaaactgtgaggacaggctgccggtcaaggggactgaagcaaatggtaaaaaaccaagtcagcagaagaaattagaggagagaccagttaataaatgtagtgatcaaataaagctaaaaaataccactgacaaaaagaataatgaaaatcgagagtctgaaaagaaaggacagagaacaagtacatttcaaataaatggaaaagataataaacccaaaatatatttgaaaggtgaatgcttgaaagaaatttctgagagtagagtagtaagtggtaatgttgaaccaaaggttaataatataaataaaataatccctgagaatgatattaaatcattgactgttaaagaatctgctataaggccattcattaatggtgatgtcatcatggaagattttaatgaaagaaacagctccgaaacaaaatcgcatttgctgagttcttcagatgctgaaggtaactaccgagatagccttgagaccctgccatcaaccaaagagtctgacagtacacagacgaccacaccctcagcatcttgtccagaaagcaattcagttaatcaggtagaagatatggaaatagaaacctcagaagttaagaaagttacttcatcacctattacttctgaagaggaatctaatctcagtaatgactttattgatgaaaatggtctgcccatcaacaaaaatgaaaatgtcaatggagaatctaaaagaaaaaccgtcatcacagaagtcaccacgatgacctccacagtggccacagaatcaaaaactgtgatcaaggtagaaaaaggcgataagcaaactgtggtttcttccacagaaaattgtgcaaaatccactgtcacaaccaccactacaacagtgaccaagctttccacaccctccacaggcggcagtgtggacatcatctctgtaaaggagcagagcaaaaccgtggtcaccacgacagtgacagactccctgaccaccacgggaggcacactggttacatctatgactgtgagcaaagagtattccacacgagacaaagtgaaactgatgaaattttcaagaccaaagaagactcgttcaggtacagctctgccatcctatagaaaatttgttaccaagagcagcaagaagagcatttttgttttgcctaatgatgacttaaaaaagttggcccgaaaaggaggaatccgagaggtcccttattttaattacaatgcaaaacctgctttggatatatggccatatccttctcctagaccgacctttggcatcacttggaggtatagacttcagacagtaaagtccttagctggagtgagcctgatgttacggttactgtgggcaagtttgagatgggatgatatggcggccaaggctcctccaggaggagggactacacggacagaaacatccgaaactgaaatcacaacaacagaaataattaagaggagagatgttggtccttatggcattcgatctgaatattgtatcaggaaaatcatttgtcccattggagttccagaaacaccaaaagaaacgcctacacctcagaggaaaggccttcgatcaagtgcactgcggccaaagagaccagaaacgcccaagcaaactggccctgttattattgaaacctgggtagcagaagaagaactggaattgtgggagatcagggcatttgctgagagagtggagaaagaaaaggcacaagcagttgagcaacaggctaagaaacgactggagcagcagaagccgacagtgattgcaacttccactacttccccaacaagcagtacaaccagcaccatctctccagcacagaaggttatggtggcccccataagtggctcagttacaactggaaccaaaatggtactaactactaaagttggatctccagctacagtaacattccaacaaaacaagaactttcatcaaacctttgctacatgggttaagcaaggccagtcaaattcaggcgttgttcaagtacagcagaaagtcctgggtatcattccatcaagtacaggtaccagtcagcaaacctttacttcattccagcccaggacagcaacagtcacaattaggcccaatacctcaggctctggaggaaccacaagcaattcacaagtaatcacagggcctcagattcgccctggtatgaccgtgattagaacaccactccaacagtcaacactaggaaaggcaattattcgaacacctgtgatggtacagccaggtgctcctcagcaagtgatgactcaaatcatcagggggcagcctgtctccactgcagtctccgcccctaacacggtttcctcaacacctgggcagaaaagcttaacttcagcaacgtccacttcaaatatacagtcttcagcctcacaaccccctcgcccccaacaaggacaagtgaagctcaccatggctcaacttactcagttaacacagggccacggtggcaatcaaggtttgacagtagtaattcaaggacaaggtcaaactactggacagttgcagttgatacctcaaggggtgactgtactcccaggcccaggccagcagctaatgcaagctgcaatgccaaatggtactgttcagcgattcctctttaccccattggcaacaacagccaccacagccagcaccaccaccaccactgtttccacgacagcagcaggtacaggtgaacaaaggcagagtaaactgtcaccccagatgcaggtacatcaagacaaaaccctgccaccagctcagtcatcaagtgtgggtccagcagaagcccagccacagactgctcagccttcagctcagccccagccccaaacccagccccagtccccagctcagcctgaagttcagactcagcctgaagttcagacccaaacaactgtttcatcccatgtcccttctgaagcacaacccacccacgcacagtcatccaagccccaagttgcagcacagtctcagcctcaaagtaatgtccaaggacagtctcctgttcgtgtccaaagtccatcacagactcgaatacgtccatcaactccatcccaactgtctcctggacaacaatcccaggttcagactacaacctcacaaccgattccaattcaaccacatacatctcttcagataccttcccaaggccagccacagtcacaaccccaggtggtgatgaagcataatgctgtaatagaacatttaaaacagaaaaagagcatgactccagctgaaagagaagagaatcaaagaatgattgtctgtaaccaggtgatgaagtatattttggataagatagataaagaagaaaaacaggcagcaaaaaaacggaagcgtgaagagagtgtggagcagaaacgtagcaagcagaatgccactaagctgtcagctctgctcttcaagcacaaagagcagctcagagccgagatcctgaagaagagagcactcctggacaaggatctgcaaattgaagtgcaggaagagctgaagagagacctgaaaattaagaaagaaaaagacctgatgcagttggctcaggccacagcagtagctgcaccctgccccccagtgacaccagctcctccagcccctccagcccctccaccttcacctccccctccacctgctgtgcaacacacaggccttctgtccacgcccaccttacctgctgcttcccagaagaggaagcgggaagaggaaaaagactccagctcaaagtccaagaaaaagaaaatgatctctactacctcaaaggaaactaagaaggacacaaagctttactgtatctgtaaaacgccttatgatgaatctaaattttatattggctgtgatcggtgtcagaattggtaccatgggcgctgcgttggcatcttgcaaagtgaggcagagctcattgatgagtatgtctgtccacagtgccagtcaacagaggatgccatgacagtgctcacgccactaacagagaaggattatgaggggttgaagagggtgctccgttccttacaggcccataagatggcctggcctttccttgaaccagtagaccctaatgatgcaccagattattatggtgttattaaggaacctatggaccttgccaccatggaagaaagagtacaaagacgatattatgaaaagctgacggaatttgtggcagatatgaccaaaatttttgataactgtcgttactacaatccaagtgactccccattttaccagtgtgcagaagttctcgaatcattctttgtacagaaattgaaaggcttcaaagctagcaggtctcataacaacaaactgcagtctacagcttcttaaagttcagcgtgttaacctaacataaaacacagcaagaatctggttgtctgaactattttaaattaaggagccagatgtttttagtcaggctatcctgacaagacttgacctaaacttcgtttttattggtcataacagtccaattatattcttggccaattttgtccaacggacaagaaaaaagcaaagtcaacgacaccattatcttgtcaagatcagatggttttactattgtggcagaagcgagaaaactttgtttattgaaaaaaaaagaaaaagaaagcaagaaaaaaagatactatggggtcaagtgtaactccatggaaatgccacgtctgctcttcagtgaagaagctggtttagagtctcacagaaaacttttgactgtatttatttattgttgcaaaaaagacgcttttttattgctgccctcatttgtcagctaattattttttcttataaaatccagccccggttacatataatcatctgtatcttatcatgattcctgtaggtaaaagtacaagacgacctctagatgtcttttctttctatgaaaggagctgctatgtacacatgtgcacacacacacaactgggaatcaacaatgagtttattgttcatggtagattaaaattaagcttgcataaaggttgggctaagtggtcctggactacagactctgttgccttgaatataacagtacaatttgtcaattactctgcaccaggctaaaatgagtaaaatctatttgaaggtatcttgtttgtaaacatttgtcagattctaatttttttcttttgtattaaaattcaactatggatgtatatgaaacaaaataaatggagataatttttctcccacagacagaggtgtctttgaatgtgcgctaatgattatctgtaagcctttgtggggagggaggcctgcaaggtcatgaaaggcagaagagtctaattgtgcctggatttctccaggacagcagtggcccctcgttttatcattcccagtccattgtcatcacgtcagagaaaaatcttcaggggtgctaatcctgttgcatcagttgatcatactaacgagaacggtaatgcgacaagatacacattgccttcatctgtacattctgtgataccaggcaaattaccaattacacacagctacttatattttatgaagggcattttttagatgacctcatcctctgtgttatttgttgattgggtttgttttctgtttgttggtttgtttgtttcttccacgtaaggaaaagtagtgtaaacagtagcgagaaaatggaaaccacagaggaagatgtattttgcatgtttttcctttcagtgttcttacacgttgtatcactgcattgtggtaatagcttctataaaatctgccatagttggattatgcagctttgcaaaaatttttactagattttgcactaactcatattagctttgtcctaccaacttctggaatttatctaattattgtttttcaaagtttctttccttttaatgtttccctgctatgcaaaacctttcccagacctcagtttcttaaaagaaagatgttgctacagttcccgattctttcttattacaggctcaggtgtacaggttattctgggttaattttatctaatgaagcccattcctttttgtacataaagatgtcacttaaacttatgcttacaaactaaagactaatcgctcaatatgaaaacatgaaaaaatttttgcttaaagtattaagatggaagtagttaaatatgggttattttgtccttttacttttttaaaaaatgttacatattgtatgcactgtgctgatgcaagaattctacattttaatgagttataaaattattctgcatctcatcacgtcacagtatttctgtactatttattcatatatataaatatatatgggcttaatcatttaaaatttgttgcagcaagaactttcctacctgtaggcaatagattgctatgtttttaacaaattgtggcaaattctaaacagcaattcttttgtacgtaataggacatttcatcctagaaaaataaagtaatgtttttgacattgga

SEQ ID NO: 171 - DNA, 3128 bp, Homo sapiens
ccttgtgcatttggtctgaagacaaagatgactgcaggagtgggcaggccggagtgggggtgacctggcctgtgccaggaaggaggaggagtctgcagccctgtgcggttcaacatccatcaaggagtccagagcaggagccaggccaggcgggagggaaaggccctgggaggggctctctaatctcccagccccgactctgccccgtcactgccgctgctcctcattactcgctggggctgctgtcgcctccccgaagggtggccttgtccagatagtggcaaacctccctgccgtggatgagtcaggagcattttcttaagaggaacatcactggaaaacaaaatgagcggggacacagaaaccaacagcagtggctgcatttgtggtacaggctcctcttccagagctcgctgatgcccacctcagacaggcctgaccacggcacggctggtgggatttgccagtcacctcaaccagccagttccaccctcagcttctctcagaagggagcaccacactcctcaagctcagtgaatgtatcccggcatgggtggggccagagcctgtgatatctcgaggtgggctcggcaggacaccggggtgtggaagggggaagcgagcacctgactcagacagcgcgggagctcgcaggagtcacgaggccacagcgacttcattgtctgactgggcctggacctataaacttcccacctcagccttgggccaagcctggaagataaaaatggagcaccccatggcgcccctcactcagattctcccctgggcttctcccacgcagccccagaagaggacacaccagccccagagttagccccagaggcccctgagcctcctgaagagccccgcctaggagtgctgaccgtgaccgacacaaccccagactccatgcgcctctcgtggagcgtggcccagggcccctttgattccttcgtggtccagtatgaggacacgaacgggcagccccaggccttgctcgtggacggcgaccagagcaagatcctcatctcaggcctggagcccagcaccccctacaggttcctcctctatggcctccatgaagggaagcgcctggggcccctctcagctgagggcaccacagggctggctcctgctggtcagacctcagaggagtcaaggccccgcctgtcccagctgtctgtgactgacgtgaccaccagttcactgaggctcaactgggaggccccaccgggggccttcgactccttcctgctccgctttggggttccatcaccaagcactctggagccgcatccgcgtccactgctgcagcgcgagctgatggtgccggggacgcggcactcggccgtgctccgggacctgcgttccgggactctgtacagcctgacactgtatgggctgcgaggaccccacaaggccgacagcatccagggaaccgcccgcaccctcagcccagttctggagagcccccgtgacctccaattcagtgaaatcagggagacctcagccaaggtcaactggatgcccccaccatcccgggcggacagcttcaaagtctcctaccagctggcggacggaggggagcctcagagtgtgcaggtggatggccaggcccggacccagaaactccaggggctgatcccaggcgctcgctatgaggtgaccgtggtctcggtccgaggctttgaggagagtgagcctctcacaggcttcctcaccacggttcctgacggtcccacacagttgcgtgcactgaacttgaccgagggattcgccgtgctgcactggaagcccccccagaatcctgtggacacctatgacgtccaggtcacagcccctggggccccgcctctgcaggcggagaccccaggcagcgcggtggactaccccctgcatgaccttgtcctccacaccaactacaccgccacagtgcgtggcctgcggggccccaacctcacttccccagccagcatcaccttcaccacagggctagaggcccctcgggacttggaggccaaggaagtgaccccccgcaccgccctgctcacttggactgagcccccagtccggcccgcaggctacctgctcagcttccacacccctggtggacagaaccaggagatcctgctcccaggagggatcacatctcaccagctccttggcctctttgggtccacctcctacaatgcacggctccaggccatgtggggccagagcctcctgccgcccgtgtccacctctttcaccacgggtgggctgcggatccccttccccagggactgcggggaggagatgcagaacggagccggtgcctccaggaccagcaccatcttcctcaacggcaaccgcgagcggcccctgaacgtgttttgcgacatggagactgatgggggcggctggctggtgttccagcgccgcatggatggacagacagacttctggagggactgggaggactatgcccatggttttgggaacatctctggagagttctggctgggcaatgaggccctgcacagcctgacacaggcaggtgactactccatccgcgtggacctgcgggctggggacgaggctgtgttcgcccagtacgactccttccacgtagactcggctgcggagtactaccgcctccacttggagggctaccacggcaccgcaggggactccatgagctaccacagcggcagtgtcttctctgcccgtgatcgggaccccaacagcttgctcatctcctgcgctgtctcctaccgaggggcctggtggtacaggaactgccactacgccaacctcaacgggctctacgggagcacagtggaccatcagggagtgagctggtaccactggaagggcttcgagttctcggtgcccttcacggaaatgaagctgagaccaagaaactttcgctccccagcggggggaggctgagctgctgcccacctctctcgcaccccagtatgactgccgagcactgaggggtcgccccgagagaagagccagggtccttcaccacccagccgctggaggaagccttctctgccagcgatctcgcagcactgtgtttacaggggggaggggaggggttcgtacaggagcaataaaggagaaactgaggtacccgaaaa

SEQ ID NO: 172 - DNA, 3057 bp, Homo sapiens
  FSBP
gagcttctccggcggcgaggggatagctggttaccagaaggacttctttgcagggccagtggtttctgtcagattttcgccggtcacgactgctgaatatgagacgatctgcagcaccaagtcagttgcaggggaattccttcaaaaaaccaaaatttatacctccaggaagaagtaatccaggtctgaatgaagagattacaaaactgaatccagatataaaattatttgagggtgttgcaattaataacacctttctcccgtcacaaaatgatcttagaatatgcagtttaaatctgcctagtgaagaaagtactagagaaatcaataacagagataattgcagtggaaaatattgttttgaagcacctacactggcaacattagatccacctcatacagttcattcggctcctaaagaagtagcagtgtccaaggaacaagaagagaaatctgatagcctagttaaatatttcagtgttgtttggtgtaagccttcaaagaaaaaacataaaaagtgggaaggtgatgctgttcttattgtaaaaggaaagtcatttatattaaagaatttggaaggcaaagacattggaagaggcattggttataaattcaaagagcttgaaaagattgaagagggccaaacactgatgatttgtggaaaagaaatagaagtcatgggtgtaatctctccagatgacttcagcagtggcaggtgttttcagcttggaggaggaagtactgctatctcgcattcttctcaggttgccaggaaatgtttctctaaccctttcaaaagtgtttgtaaaccaagttcaaaggaaaatagacagaatgatttccaaaattgcaaaccacgccatgacccatatacgccaaattccctcgttatgccacgaccagataagaatcaccagtgggtattcaataagaactgtttccctcttgtggatgtagtgattgatccttaccttgtatatcatcttcgaccacatcagaaagaaggaatcatattcctttatgaatgtgtaatgggaatgagaatgaatggcagatgtggagctattcttgctgatgaaatgggtttagggaagacattgcaatgtatttcgctcatctggaccctgcagtgtcagggaccctatggaggcaagccagtaataaagaagacactaattgtcacacctggaagcttggtgaataattggaagaaagaatttcaaaaatggctaggaagtgaaaggatcaagatatttactgttgatcaggaccacaaagttgaagaattcatcaagtctatattttattctgttcttattatcagttatgaaatgttacttcgttccctggatcaaattaagaatataaaatttgatcttctaatctgtgacgaggggcatcgtttgaagaacagtgccattaagacaactacagccctcattagcctttcttgtgagaaaagaataattctaactggtactccaattcagaatgatctgcaagaattttttgcattaattgattttgtaaatccaggaatattaggctctttgtcatcttataggaaaatatatgaagaacccatcattttatcgagagaaccttctgcttctgaggaagaaaaggagttaggagaaagaagagcagctgaacttacttgcctcactggactctttatccttagaagaacccaagaaattataaataaatatctcccacctaaaatagagaatgttgtcttttgccgaccaggagcactacagattgagctttatcgaaagctgttaaattctcaggttgtcaggttctgccttcaagggttgttggaaaatagtccccatctaatatgtataggagctcttaaaaaactgtgcaatcacccctgccttttgttcaactctataaaggaaaaggaatgtagctcaacttgtgataaaaatgaagaaaagagtctatacaaaggcttgctaagtgtgtttcctgctgactacaaccctctcctgtttactgaaaaggagtcaggaaaactacaggtgttgtccaagctcttagcggttatccacgaacttcgacctactgaaaaggtggtgttggtatccaactatacacaaaccttgaacattttacaagaagtatgtaagcgtcatggatatgcttatacaagacttgatggacaaacaccaatctctcaaaggcagcagattgttgatggctttaacagtcaacactcttctttttttatttttttgttaagttcaaaagctggtggtgtaggacttaacctcattggaggatctcacttaattctctatgacattgattggaatccagccactgacattcaggcaatgtctagagtatggagagatggtcagaaatatcctgtacatatttacagactcctaactacaggtacaatagaagaaaagatctatcaaaggcagatcagtaagcaaggtctttgtggggcagttgtcgacctcaccaagacatctgaacatattcagttttcagtagaagaacttaaaaatttgttcacattacatgaaagttcagattgtgttactcatgatctgcttgactgtgagtgtacaggagaagaagttcatacaggtgattcgttggaaaaattcattgtctctagagattgtcagcttggtccacatcaccagaaatctaactccctgaaacctctttctatgtcccagctgaagcaatggaaacatttttctggagatcatttaaatcttacagatccttttcttgaaagaataacagaaaatgtgtcattcatttttcagaatataaccactcaagctactggcacatagtgaaagattacttctgacattccattgctcttcttttgaaaattagtatggtaattaaatgtactttttgaaaattaatagaattatttaaattacagtatatgttgcaaaatatatcacttttgatacaatagtcaaaattgagtggtttaatgttttgtaaatattaagtgtttaaatgaaaaataaagatgtgcttatatcattgtaaaaaaaaaaaaaaaaa

SEQ ID NO: 173 - DNA, 454 bp, Homo sapiens
  BSG
gcgtcgactttttttttttttgagacagagcctcactctgttgctcaggctggagtgcagtggcacaaactcagctcatgacaacgtatgcctcctgggttcaagcgattctcacgcttcagccaactaagtagctgggatttcaggcatgcgccactcctggctgactttttctatttttagtagagacagagttttgccatggttggccaagctagtctcgaactcttggcctcaagcgatccgcccacctcagcctcccaaagtgctgggattacagacaggcgggagccacagtgcctggccttgcattaatttttaaaatgagaaataatacagtcttgctttcatttaaaactttttccaagaaaccatgagcaaacctgtgtttaccatatatactgtactgaatatttggacatcaccatttcaatgtaaagtcagatgctaataa

SEQ ID NO: 174 - DNA, 534 bp, Homo sapiens
  CSK
tttgcaaactttcttatcttttagaatttgtaatatttgttcataaataggcacaaaataatttaaaaagccaaactgcattgggtaaatttacaagcctttgccttcttcaactcatgccacccacgcaacatttagttttactatatattacagctttctttacagcagaaaactttgaagtcttgttaaagggcaatacttgtgggtccccttaagatgtgtctctgtgtgtgtgtgtgtgtgtgtatgtgtgtgtgtgttacatttgtctgaactgcaacaaccaagcatggccaaacatttcccattatacattatagcaatctttcttctgaacaacaaactgatttttaaactgagaataaaaagtttataccactgtattgtgtgtagtccatgttctaaatccaggatgccccggagccaaaatgccctttcaggttctgcctgcaggttaggaaatagcaacagtttttgtttgtttgtttgttttctttagggatcaagggggctaggagggttacagaaatg

SEQ ID NO: 175 - DNA, 2383 bp, Homo sapiens; identical to SEQ ID NO: 156
  HSP72; HSPA1; HSPA1B; HSP70-1

SEQ ID NO: 176 - DNA, 2230 bp, Homo sapiens
  SMAR1; SMARBP1; FLJ10177; FLJ20538; DKFZp761H172
gcagagcggcggcttctctcgcgaggacggacgccattatcgcatctccccgacaaacaccacgagaattccgcagcccacacggtgaccaaaagccagccccactgtgagttgaactctttcgtgttgaccggccactctccgtgctctggatgatgtcggaacacgacctggccgatgtggttcagattgcagtggaagacctgagccctgaccacccagttgttttggagaatcatgtagtgacagatgaagacgaacctgctttgaaacgccagcgactagaaatcaattgccaggatccatctataaagtcattcctgtattccatcaaccagacaatctgcttgcggttggatagcattgaagccaaattgcaagccctggaggctacttgtaaatccttagaagaaaagctggatctggtcacgaacaagcagcacagccccatccaggtccccatggtggccggctcccctctcggggcaacccagacgtgcaacaaagtgcgatgcgctgtgcctgggcgtcggcagaacaccattgtggtgaaggtgccgggccaagaagacagccaccacgaggacggggagagcggctcggaggccagcgactctgtgtccagctgtgggcaggcgggcagtcagagcatcgggagcaacgtcacgctcatcaccctgaactcggaagaggactaccccaatggcacctggctgggcgacgagaacaaccccgagatgcgggtacgctgcgccatcatcccctccgacatgctgcacatcagcaccaactgccgcacggccgagaagatggcgctcacgctgctggactacctcttccaccgcgaggtgcaggctgtgtccaacctctcggggcagggcaagcacgggaagaagcagctggacccgctcaccatctacggcatccggtgtcaccttttctataaatttggcatcacagaatccgactggtaccgaatcaagcagagcatcgactccaagtgccgcacggcgtggcggcgcaagcagcggggccagagcctggcggtcaagagcttctcgcggagaacgcccaactcgtcctcctactgcccttcagagccgatgatgagcaccccacctcctgccagcgagctcccgcagccacagccgcagccgcaggccctgcactacgcgctggccaacgcacagcaggtgcagatccaccagatcggagaagacggacaggtgcaagtaatcccacagggacacctccacatcgcccaggtgccgcagggggagcaagtccagatcacgcaggacagcgagggcaacctccagatccatcacgtggggcaggacggtcaggtgctgcagggtgcacagctgatcgccgtggcctcctcggaccccgcggcggcgggcgtggatgggtcgccactccagggcagcgacatccaggttcagtacgtgcagctggcgccagtgagtgaccacacggccggggcacagacggccgaagccctgcagcccacgctacagccggagatgcagctcgagcacggggccatccagattcagtgagcggtgcccatggcaccaggagcccctcgccggctccgcctacggcccggcccccacgcgccctgctctcacggcctcggcacaggcagcggctgcacgtgttctgctgaagtgcgtctgaaggccgctgcctccgcggggaacagcatcctatcaactgaaagagcagccgccgccgcccccagccggagacccctttcgtttgagtcctgctgttggtgtcggagcacgaggggaggcacggtgcggagagcgtcgcatatgcgcgggaaatcaagaactatgatatttttctgtttaaacagctttttttaatttgctatggtgtttataacaaaaaagaaaatttgaaaaaaaaaatcccaggggagtagcaggagccctttgctgtgtgctctgtccagtgtcatgagacgggagccctttgctgtgtgctctgtccagtgtcatgagacgggagccctttgctgtgtgctctgtccagtgtcatgagacgggagccctttgctgtgtgctctgtccagtgtcatgaggcaggtgtttgcaaagccagctctcggttccgatggggtattgctgacctacttttctaggggaaatgctcttaaacactgtaattatgcatttctaatgaaataaaatgtatttatgaccacaaaaaaaaaaaa

SEQ ID NO: 177 - DNA, 2876 bp, Homo sapiens
  PAI; PAI1; PAI-1; PLANH1
gaattcctgcagctcagcagccgccgccagagcaggacgaaccgccaatcgcaaggcacctctgagaacttcaggatgcagatgtctccagccctcacctgcctagtcctgggcctggcccttgtctttggtgaagggtctgctgtgcaccatcccccatcctacgtggcccacctggcctcagacttcggggtgagggtgtttcagcaggtggcgcaggcctccaaggaccgcaacgtggttttctcaccctatggggtggcctcggtgttggccatgctccagctgacaacaggaggagaaacccagcagcagattcaagcagctatgggattcaagattgatgacaagggcatggcccccgccctccggcatctgtacaaggagctcatggggccatggaacaaggatgagatcagcaccacagacgcgatcttcgtccagcgggatctgaagctggtccagggcttcatgccccacttcttcaggctgttccggagcacggtcaagcaagtggacttttcagaggtggagagagccagattcatcatcaatgactgggtgaagacacacacaaaaggtatgatcagcaacttgcttgggaaaggagccgtggaccagctgacacggctggtgctggtgaatgccctctacttcaacggccagtggaagactcccttccccgactccagcacccaccgccgcctcttccacaaatcagacggcagcactgtctctgtgcccatgatggctcagaccaacaagttcaactatactgagttcaccacgcccgatggccattactacgacatcctggaactgccctaccacggggacaccctcagcatgttcattgctgccccttatgaaaaagaggtgcctctctctgccctcaccaacattctgagtgcccagctcatcagccactggaaaggcaacatgaccaggctgccccgcctcctggttctgcccaagttctccctggagactgaagtcgacctcaggaagcccctagagaacctgggaatgaccgacatgttcagacagtttcaggctgacttcacgagtctttcagaccaagagcctctccacgtcgcgcaggcgctgcagaaagtgaagatcgaggtgaacgagagtggcacggtggcctcctcatccacagctgtcatagtctcagcccgcatggcccccgaggagatcatcatggacagacccttcctctttgtggtccggcacaaccccacaggaacagtccttttcatgggccaagtgatggaaccctgaccctggggaaagacgccttcatctgggacaaaactggagatgcatcgggaaagaagaaactccgaagaaaagaattttagtgttaatgactctttctgaaggaagagaagacatttgccttttgttaaaagatggtaaaccagatctgtctccaagaccttggcctctccttggaggacctttaggtcaaactccctagtctccacctgagaccctgggagagaagtttgaagcacaactcccttaaggtctccaaaccagacggtgacgcctgcgggaccatctggggcacctgcttccacccgtctctctgcccactcgggtctgcagacctggttcccactgaggccctttgcaggatggaactacggggcttacaggagcttttgtgtgcctggtagaaactatttctgttccagtcacattgccatcactcttgtactgcctgccaccgcggaggaggctggtgacaggccaaaggccagtggaagaaacaccctttcatctcagagtccactgtggcactggccacccctccccagtacaggggtgctgcaggtggcagagtgaatgtcccccatcatgtggcccaactctcctggcctggccatctccctccccagaaacagtgtgcatgggttattttggagtgtaggtgacttgtttactcattgaagcagatttctgcttccttttatttttataggaatagaggaagaaatgtcagatgcgtgcccagctcttcaccccccaatctcttggtggggaggggtgtacctaaatatttatcatatccttgcccttgagtgcttgttagagagaaagagaactactaaggaaaataatattatttaaactcgctcctagtgtttctttgtggtctgtgtcaccgtatctcaggaagtccagccacttgactggcacacacccctccggacatccagcgtgacggagcccacactgccaccttgtggccgcctgagaccctcgcgccccccgcgccccccgcgcccctctttttccccttgatggaaattgaccatacaatttcatcctccttcaggggatcaaaaggacggagtggggggacagagactcagatgaggacagagtggtttccaatgtgttcaatagatttaggagcagaaatgcaaggggctgcatgacctaccaggacagaactttccccaattacagggtgactcacagccgcattggtgactcacttcaatgtgtcatttccggctgctgtgtgtgagcagtggacacgtgaggggggggtgggtgagagagacaggcagctcggattcaactaccttagataatatttctgaaaacctaccagccagagggtagggcacaaagatggatgtaatgcactttgggaggccaaggcgggaggattgcttgagcccaggagttcaagaccagcctgggcaacataccaagacccccgtctctttaaaaatatatatattttaaatatacttaaatatatatttctaatatctttaaatatatatatatattttaaagaccaatttatgggagaattgcacacagatgtgaaatgaatgtaatctaatagaagc

SEQ ID NO: 178 - DNA, 4093 bp, Homo sapiens
  GEF; P40; GEFH1; LFP40; GEF-H1; KIAA0651; DKFZp547L106; DKFZp547P1516
gggatcccgggagggagcggagcggacctgggcttggtcgcctccaagccggcgggaccgagtgctttaggccgctcgaaagaaagttgctccgacccgggaaaaggagaagatgaaggaagccaaggatgcccgctataccaatgggcacctcttcaccaccatttcagtttcaggcatgaccatgtgctatgcctgtaacaagagcatcacagccaaggaagccctcatctgcccaacctgcaatgtgactatccacaaccgctgtaaagacaccctcgccaactgtaccaaggtcaagcagaagcaacagaaagcggccctgctgaagaacaacaccgccttgcagtccgtttctcttcgaagtaagacaaccatccgggagcggccaagctcggccatctacccctccgacagcttccggcagtccctcctgggctcccgccgtggccgctcctccttgtctttagccaagagtgtttctaccaccaacattgctggacatttcaatgatgagtctcccctggggctgcgccggatcctctcacagtccacagactccctcaacatgcggaaccgaaccctatccgtggaatccctcattgacgaagaggtaatctacagtgagctgatgagtgactttgagatggatgagaaggactttgcagctgactcttggagtcttgctgtggacagcagcttcctgcagcagcataaaaaggaggtgatgaagcagcaagatgtcatctatgagctaatccagacagagctgcaccatgtgaggacactgaagatcatgacccgcctcttccgcacggggatgctggaagagctacacttggagccaggagtggtccagggcctgttcccctgcgtggacgagctcagtgacatccatacacgcttcctcagccagctattagaacgccgacgccaggccctgtgccctggcagcacccggaactttgtcatccatcgcttgggtgatctgctcatcagccagttctcaggtcctagtgcggagcagatgtgtaagacctactcggagttctgcagccgccacagcaaggccttaaagctctataaggagctgtacgcccgagacaaacgcttccagcaattcatccggaaagtgacccgccccgccgtgctcaagcggcacggggtacaggagtgcatcctgctggtgactcagcgcatcaccaagtacccgttactcatcagccgcatcctgcagcattcccacgggatcgaggaggagcgccaggacctgaccacagcactggggctagtgaaggagctgctgtccaatgtggacgagggtatttatcagctggagaaaggggcccgtctgcaggagatctacaaccgcatggaccctcgggcccaaaccccagtgcctggcaagggcccctttggccgagaggaacttctgaggcgcaaactcatccacgatggctgcctgctctggaagacagcgacggggcgcttcaaagatgtgctagtgctgctgatgacagatgtactggtgtttctccaggaaaaggaccagaagtacatctttcctaccctggacaagccttcagtggtatcgctgcagaatctaatcgtacgagacattgccaaccaggagaaagggatgtttctgatcagcgcagccccacctgagatgtacgaggtgcacacagcatcccgggatgaccggagcacctggatccgggtcattcagcagagcgtgcgcacatgcccatccagggaggacttccccctgattgagacagaggatgaggcttacctgcggcgaattaagatggagttgcagcagaaggaccgggcactggtggagctgctgcgagagaaggtcgggctgtttgctgagatgacccatttccaggccgaagaggatggtggcagtgggatggccctgcccaccctgcccaggggccttttccgctctgagtcccttgagtcccctcgtggcgagcggctgctgcaggatgccatccgtgaggtggagggtctgaaagacctgctggtggggccaggagtggaactgctcttgacaccccgagagccagccctgcccttggaaccagacagcggtggtaacacgagtcctggggtcactgccaatggtgaggccagaaccttcaatggctccattgaactctgcagagctgactcagactctagccagagggatcgaaatggaaatcagctgagatcaccgcaagaggaggcgttacagcgattggtcaatctctatggacttctacatggcctacaggcagctgtggcccagcaggacactctgatggaagcccggttccctgagggccctgagcggcgggagaagctgtgccgagccaactctcgggatggggaggctggcagggctggggctgcccctgtggcccctgaaaagcaggccacggaactggcattactgcagcggcaacatgcgctgctgcaggaggagctacggcgctgccggcggctaggtgaagaacgggcaaccgaagctggcagcctggaggcccggctccgggagagtgagcaggcccgggcactgctggagcgtgaggccgaagaggctcgaaggcagctggccgccctgggccagaccgagccactcccagctgaggccccctgggcccgcagacctgtggatcctcggcggcgcagcctccccgcaggcgatgccctgtacttgagtttcaaccccccacagcccagccgaggcactgaccgcctggatctacctgtcactactcgctctgtccatcgaaactttgaggaccgagagaggcaggaactggggagccccgaagagcggctgcaagacagcagtgaccctgacactggcagcgaggaggaaggtagcagccgtctgtctccgccccacagtccacgagactttaccagaatgcaggacatcccggaggagacggagagccgcgacggggaggctgtagcctccgagagctaagggggcccctcccccctgccccgtgccccactgaagaacattactgagggggctaaccttggggactccaatttgccaatgatgagggaacatttgaaagaactgcaaattgtccttgccagctcttgggatccttggatacctggggccatttaagaagctaggggaattaggccacaacaccccctgggacatccgaaagctacaccacagatgccagtggttcatgccttcttcccgcaactttaggaaaatttatttatttattgtttattagttatggggggagaggggagatttaaaggaccagggacatgggaaccaagccatagggatcagagggccttgtccttgaacactactggggtatattcaggctcatccacgcagctgctgggttcttgccctaacggccctcccctgcaacatccgtcttggaggagaggctgcagccacagcaccctactgccctttaaataaaggagggctgtgggcagggccatgtccctttctcctctcccctcaacctcttactgctgttctccctttctccgtccttcatggaagccctgggagataacctggcttcctggagttgatggaataaaggttggggtggccataatggtttgttgggggtgagggaaaaaacccacagggaccagaatgttttgttgttcttttgttttcttttttgtaccaaagtcaactgcacgtgttttatatttttaagagatcgtaggcaattagagatcgaagcctcctatctccacatctctgaagaagttgaggggtgggggagagaatgacttctgccttcatctgcagtaacggggggacctatactgacctcttccccagccatttagaaacaagttctagggtgggttggaaaatctccaagagccctgacctcatcttccacctcagcaaccatgacctgaaacctcagcgtgaatttgggggatttttcagtggaacccttgcccccaaatgtcgaccagcccccaaatgtcgaagaattttcttcttgccaattttgttgtttaaaaaaaaaattcagggaaaattaaaaacctggaactccaaaaaaaaaaaaaaaaa

SEQ ID NO: 179 - DNA, 2386 bp, Homo sapiens
  SGK1
agcatacgccgagccggtctttgagcgctaacgtctttctgtctccccgcggtggtgatgacggtgaaaactgaggctgctaagggcaccctcacttactccaggatgaggggcatggtggcaattctcatcgctttcatgaagcagaggaggatgggtctgaacgactttattcagaagattgccaataactcctatgcatgcaaacaccctgaagttcagtccatcttgaagatctcccaacctcaggagcctgagcttatgaatgccaacccttctcctccaccaagtccttctcagcaaatcaaccttggcccgtcgtccaatcctcatgctaaaccatctgactttcacttcttgaaagtgatcggaaagggcagttttggaaaggttcttctagcaagacacaaggcagaagaagtgttctatgcagtcaaagttttacagaagaaagcaatcctgaaaaagaaagaggagaagcatattatgtcggagcggaatgttctgttgaagaatgtgaagcaccctttcctggtgggccttcacttctctttccagactgctgacaaattgtactttgtcctagactacattaatggtggagagttgttctaccatctccagagggaacgctgcttcctggaaccacgggctcgtttctatgctgctgaaatagccagtgccttgggctacctgcattcactgaacatcgtttatagagacttaaaaccagagaatattttgctagattcacagggacacattgtccttactgacttcggactctgcaaggagaacattgaacacaacagcacaacatccaccttctgtggcacgccggagtatctcgcacctgaggtgcttcataagcagccttatgacaggactgtggactggtggtgcctgggagctgtcttgtatgagatgctgtatggcctgccgcctttttatagccgaaacacagctgaaatgtacgacaacattctgaacaagcctctccagctgaaaccaaatattacaaattccgcaagacacctcctggagggcctcctgcagaaggacaggacaaagcggctcggggccaaggatgacttcatggagattaagagtcatgtcttcttctccttaattaactgggatgatctcattaataagaagattactcccccttttaacccaaatgtgagtgggcccaacgacctacggcactttgaccccgagtttaccgaagagcctgtccccaactccattggcaagtcccctgacagcgtcctcgtcacagccagcgtcaaggaagctgccgaggctttcctaggcttttcctatgcgcctcccacggactctttcctctgaaccctgttagggcttggttttaaaggattttatgtgtgtttccgaatgttttagttagccttttggtggagccgccagctgacaggacatcttacaagagaatttgcacatctctggaagcttagcaatcttattgcacactgttcgctggaagctttttgaagagcacattctcctcagtgagctcatgaggttttcatttttattcttccttccaacgtggtgctatctctgaaacgagcgttagagtgccgccttagacggaggcaggagtttcgttagaaagcggacgctgttctaaaaaaggtctcctgcagatctgtctgggctgtgatgacgaatattatgaaatgtgccttttctgaagagattgtgttagctccaaagcttttcctatcgcagtgtttcagttctttattttcccttgtggatatgctgtgtgaaccgtcgtgtgagtgtggtatgcctgatcacagatggattttgttataagcatcaatgtgacacttgcaggacactacaacgtgggacattgtttgtttcttccatatttggaagataaatttatgtgtagacttttttgtaagatacggttaataactaaaatttattgaaatggtcttgcaatgactcgtattcagatgcttaaagaaagcattgctgctacaaatatttctatttttagaaagggtttttatggaccaatgccccagttgtcagtcagagccgttggtgtttttcattgtttaaaatgtcacctgtaaaatgggcattatttatgtttttttttttgcattcctgataattgtatgtattgtataaagaacgtctgtacattgggttataacactagtatatttaaacttacaggcttatttgtaatgtaaaccaccattttaatgtactgtaattaacatggttataatacgtacaatccttccctcatcccatcacacaactttttttgtgtgtgataaactgattttggtttgcaataaaaccttgaaaaatatttacaaaaaaaaaaaaaaaa

SEQ ID NO: 180 - DNA, 6202 bp, Homo sapiens
  IK1; LYF1; hIk-1; IKAROS; PRO0758; ZNFN1A1; Hs.54452
gaattccggcgtcgcggacgcatcccagtctgggcgggacgctcggccgcggcgaggcgggcaagcctggcagggcagagggagccccggctccgaggttgctcttcgcccccgaggatcagtcttggccccaaagcgcgacgcacaaatccacataacctgaggaccatggatgctgatgagggtcaagacatgtcccaagtttcagggaaggaaagcccccctgtaagcgatactccagatgagggcgatgagcccatgccgatccccgaggacctctccaccacctcgggaggacagcaaagctccaagagtgacagagtcgtggccagtaatgttaaagtagagactcagagtgatgaagagaatgggcgtgcctgtgaaatgaatggggaagaatgtgcggaggatttacgaatgcttgatgcctcgggagagaaaatgaatggctcccacagggaccaaggcagctcggctttgtcgggagttggaggcattcgacttcctaacggaaaactaaagtgtgatatctgtgggatcatttgcatcgggcccaatgtgctcatggttcacaaaagaagccacactggagaacggcccttccagtgcaatcagtgcggggcctcattcacccagaagggcaacctgctccggcacatcaagctgcattccggggagaagcccttcaaatgccacctctgcaactacgcctgccgccggagggacgccctcactggccacctgaggacgcactccgttggtaaacctcacaaatgtggatattgtggccgaagctataaacagcgaagctctttagaggaacataaagagcgctgccacaactacttggaaagcatgggccttccgggcacactgtacccagtcattaaagaagaaactaatcacagtgaaatggcagaagacctgtgcaagataggatcagagagatctctcgtgctggacagactagcaagtaacgtcgccaaacgtaagagctctatgcctcagaaatttcttggggacaagggcctgtccgacacgccctacgacagcagcgccagctacgagaaggagaacgaaatgatgaagtcccacgtgatggaccaagccatcaacaacgccatcaactacctgggggccgagtccctgcgcccgctggtgcagacgcccccgggcggttccgaggtggtcccggtcatcagcccgatgtaccagctgcacaagccgctcgcggagggcaccccgcgctccaaccactcggcccaggacagcgccgtggagaacctgctgctgctctccaaggccaagttggtgccctcggagcgcgaggcgtccccgagcaacagctgccaagactccacggacaccgagagcaacaacgaggagcagcgcagcggtctcatctacctgaccaaccacatcgccccgcacgcgcgcaacgggctgtcgctcaaggaggagcaccgcgcctacgacctgctgcgcgccgcctccgagaactcgcaggacgcgctccgcgtggtcagcaccagcggggagcagatgaaggtgtacaagtgcgaacactgccgggtgctcttcctggatcacgtcatgtacaccatccacatgggctgccacggcttccgtgatccttttgagtgcaacatgtgcggctaccacagccaggaccggtacgagttctcgtcgcacataacgcgaggggagcaccgcttccacatgagctaaagccctcccgcgcccccaccccagaccccgagccaccccaggaaaagcacaaggactgccgccttctcgctcccgccagcagcatagactggactggaccagacaatgttgtgtttggatttgtaactgttttttgttttttgtttgagttggttgattggggtttgatttgcttttgaaaagatttttatttttagaggcagggctgcattgggagcatccagaactgctaccttcctagatgtttccccagaccgctggctgagattccctcacctgtcgcttcctagaatccccttctccaaacgattagtctaaattttcagagagaaatagataaaacacgccacagcctgggaaggagcgtgctctaccctgtgctaagcacggggttcgcgcaccaggtgtctttttccagtccccagaagcagagagcacagcccctgctgtgtgggtctgcaggtgagcagacaggacaggtgtgccgccacccaagtgccaagacacagcagggccaacaacctgtgcccaggccagcttcgagctacatgcatctagggcggagaggctgcacttgtgagagaaaatactatttcaagtcatattctgcgtaggaaaatgaattggttggggaaagtcgtgtctgtcagactgccctgggtggagggagacgccgggctagagcctttgggatcgtcctggattcactggctttgcggaggctgctcagatggcctgagcctcccgaggcttgctgccccgtaggaggagactgtcttcccgtgggcatatctggggagccctgttccccgctttttcactcccatacctttaatggcccccaaaatctgtcactacaatttaaacaccagtcccgaaatttggatcttctttctttttgaatctctcaaacggcaacattcctcagaaaccaaagctttatttcaaatctcttccttccctggctggttccatctagtaccagaggcctcttttcctgaagaaatccaatcctagccctcattttaattatgtacatctgtttgtagccacaagcctgaatttctcagtgttggtaagtttctttacctaccctcactatatattattctcgttttaaaacccataaaggagtgatttagaacagtcattaattttcaactcaatgaaatatgtgaagcccagcatctctgttgctaacacacagagctcacctgtttgaaaccaagctttcaaacatgttgaagctctttactgtaaaggcaagccagcatgtgtgtccacacatacataggatggctggctctgcacctgtaggatattggaatgcacagggcaattgagggactgagccagaccttcggagagtaatgccaccagatcccctaggaaagaggaggcaaatggcactgcaggtgagaaccccgcccatccgtgctatgacatggaggcactgaagcccgaggaaggtgtgtggagattctaatcccaacaagcaagggtctccttcaagattaatgctatcaatcattaaggtcattactctcaaccacctaggcaatgaagaatataccatttcaaatatttacagtacttgtcttcaccaacactgtcccaaggtgaaatgaagcaacagagaggaaattgtacataagtacctcagcatttaatccaaacaggggttcttagtctcagcactatgacattttgggctgactacttatttgttaggcgggagctctcctgtgcattgtaggataattagcagtatccctggtggctacccaatagacgccagtagcaccccgaattgacaacccaaactctccagacatcaccaactgtcccctgcgaggagaaatcactcctgggggagaaccactgacccaaatgaattctaaaccaatcaaatgtctgggaagccctccaagaaaaaaaatagaaaagcacttgaagaatattcccaatattcccggtcagcagtatcaaggctgacttgtgttcatgtggagtcattataaattctataaatcaattattccccttcggtcttaaaaatatatttcctcataaacatttgagttttgttgaaaagatggagtttacaaagataccattcttgagtcatggatttctctgctcacagaagggtgtggcatttggaaacgggaataaacaaaattgctgcaccaatgcactgagtgaaggaagagagacagaggatcaagggctttagacagcactccttcaatatgcaatcacagagaaagatgcgccttatccaagttaatatctctaaggtgagagccttcttagagtcagtttgttgcaaatttcacctactctgttcttttccatccatccccctgagtcagttggttgaagggagttattttttcaagtggaattcaaacaaagctcaaaccagaactgtaaatagtgattgcaggaattcttttctaaactgctttgccctttcctctcactgccttttatagccaatataaatgtctctttgcacaccttttgttgtggttttatattgtaacaccatttttctttgaaactattgtatttaaagtaaggtttcatattatgtcagcaagtaattaacttatgtttaaaaggtggccatatcatgtaccaaaagttgctgaagtttctcttctagctggtaaagtaggagtttgcatgacttcacactttttttgcgtagtttcttctgttgtatgatggcgtgagtgtgtgtcttgggtaccgctgtgtactactgtgtgcctagattccatgcactctcgttgtgtttgaagtaaatattggagaccggagggtaacaggttggcctgttgattacagctagtaatcgctgtgtcttgttccgccccctccctgacaccccagcttcccaggatgtggaaagcctggatctcagctccttgccccatatcccttctgtaatttgtacctaaagagtgtgattatcctaattcaagagtcactaaaactcatcacattatcattgcatatcagcaaagggtaaagtcctagcaccaattgcttcacataccagcatgttccatttccaatttagaattagccacataataaaatcttagaatcttccttgagaaagagctgcctgagatgtagttttgttatatggttccccaccgaccatttttgtgcttttttcttgttttgttttgttttgactgcactgtgagttttgtagtgtcctcttcttgccaaaacaaacgcgagatgaactggacttatgtagacaaatcgtgatgccagtgtatccttcctttcttcagttccagcaataatgaatggtcaacttttttaaaatctagatctctctcattcatttcaatgtatttttactttaagatgaaccaaaattattagacttatttaagatgtacaggcatcagaaaaaagaagcacataatgcttttggtgcgatggcactcactgtgaacatgtgtaaccacatattaatatgcaatattgtttccaatactttctaatacagttttttataatgttgtgtgtggtgattgttcaggtcgaatctgttgtatccagtacagctttaggtcttcagctgcccttctggcgagtacatgcacaggattgtaaatgagaaatgcagtcatatttccagtctgcctctatgatgatgttaaattattgctgtttagctgtgaacaagggatgtaccactggaggaatagagtatccttttgtacacattttgaaatgcttcttctgtagtgatagaacaaataaatgcaacgaatactctgtctgccctatcccgtgaagtccacactggcgtaagagaaggcccagcagagcaggaatctgcctagactttctcccaatgagatcccaatatgagagggagaagagatgggcctcaggacagctgcaataccacttgggaacacatgtggtgtcttgatgtggccagcgcagcagttcagcacaacgtacctcccatctacaacagtgctggacgtgggaattctaagtcccagtcttgagggtgggtggagatggagggcaacaagagatacatttccagttctccactgcagcatgcttcagtcattctgtgagtggccgggcccagggccctcacaatttcactaccttgtcttttacatagtcataagaattatcctcaacatagccttttgacgctgtaaatcttgagtattcatttacccttttctgatctcctggaaacagctgcctgcctgcattgcacttctcttcccgaggagtggggtaaatttaaaagtcaagttatagtttggatgttagtatagaattttgaaattgggaattaaaaatcaggactggggactgggagaccaaaaatttctgatcccatttctgatggatgtgtcacaccttttctgtcaaaataaaatgtcttggaggttatgactccttggtgaaa

SEQ ID NO: 181 - DNA, 3136 bp, Homo sapiens
  TIS8; AT225; G0S30; NGFI-A; ZNF225; KROX-24; ZIF-268
gcgcagaacttggggagccgccgccgccatccgccgccgcagccagcttccgccgccgcaggaccggcccctgccccagcctccgcagccgcggcgcgtccacgcccgcccgcgcccagggcgagtcggggtcgccgcctgcacgcttctcagtgttccccgcgccccgcatgtaacccggccaggcccccgcaactgtgtcccctgcagctccagccccgggctgcacccccccgccccgacaccagctctccagcctgctcgtccaggatggccgcggccaaggccgagatgcagctgatgtccccgctgcagatctctgacccgttcggatcctttcctcactcgcccaccatggacaactaccctaagctggaggagatgatgctgctgagcaacggggctccccagttcctcggcgccgccggggccccagagggcagcggcagcaacagcagcagcagcagcagcgggggcggtggaggcggcgggggcggcagcaacagcagcagcagcagcagcaccttcaaccctcaggcggacacgggcgagcagccctacgagcacctgaccgcagagtcttttcctgacatctctctgaacaacgagaaggtgctggtggagaccagttaccccagccaaaccactcgactgccccccatcacctatactggccgcttttccctggagcctgcacccaacagtggcaacaccttgtggcccgagcccctcttcagcttggtcagtggcctagtgagcatgaccaacccaccggcctcctcgtcctcagcaccatctccagcggcctcctccgcctccgcctcccagagcccacccctgagctgcgcagtgccatccaacgacagcagtcccatttactcagcggcacccaccttccccacgccgaacactgacattttccctgagccacaaagccaggccttcccgggctcggcagggacagcgctccagtacccgcctcctgcctaccctgccgccaagggtggcttccaggttcccatgatccccgactacctgtttccacagcagcagggggatctgggcctgggcaccccagaccagaagcccttccagggcctggagagccgcacccagcagccttcgctaacccctctgtctactattaaggcctttgccactcagtcgggctcccaggacctgaaggccctcaataccagctaccagtcccagctcatcaaacccagccgcatgcgcaagtaccccaaccggcccagcaagacgcccccccacgaacgcccttacgcttgcccagtggagtcctgtgatcgccgcttctcccgctccgacgagctcacccgccacatccgcatccacacaggccagaagcccttccagtgccgcatctgcatgcgcaacttcagccgcagcgaccacctcaccacccacatccgcacccacacaggcgaaaagcccttcgcctgcgacatctgtggaagaaagtttgccaggagcgatgaacgcaagaggcataccaagatccacttgcggcagaaggacaagaaagcagacaaaagtgttgtggcctcttcggccacctcctctctctcttcctacccgtccccggttgctacctcttacccgtccccggttactacctcttatccatccccggccaccacctcatacccatcccctgtgcccacctccttctcctctcccggctcctcgacctacccatcccctgtgcacagtggcttcccctccccgtcggtggccaccacgtactcctctgttccccctgctttcccggcccaggtcagcagcttcccttcctcagctgtcaccaactccttcagcgcctccacagggctttcggacatgacagcaaccttttctcccaggacaattgaaatttgctaaagggaaaggggaaagaaagggaaaagggagaaaaagaaacacaagagacttaaaggacaggaggaggagatggccataggagaggagggttcctcttaggtcagatggaggttctcagagccaagtcctccctctctactggagtggaaggtctattggccaacaatcctttctgcccacttccccttccccaattactattccctttgacttcagctgcctgaaacagccatgtccaagttcttcacctctatccaaagaacttgatttgcatggattttggataaatcatttcagtatcatctccatcatatgcctgaccccttgctcccttcaatgctagaaaatcgagttggcaaaatggggtttgggcccctcagagccctgccctgcacccttgtacagtgtctgtgccatggatttcgtttttcttggggtactcttgatgtgaagataatttgcatattctattgtattatttggagttaggtcctcacttgggggaaaaaaaaaaaagaaaagccaagcaaaccaatggtgatcctctattttgtgatgatgctgtgacaataagtttgaacctttttttttgaaacagcagtcccagtattctcagagcatgtgtcagagtgttgttccgttaacctttttgtaaatactgcttgaccgtactctcacatgtggcaaaatatggtttggtttttctttttttttttttttgaaagtgttttttcttcgtccttttggtttaaaaagtttcacgtcttggtgccttttgtgtgatgcgccttgctgatggcttgacatgtgcaattgtgagggacatgctcacctctagccttaaggggggcagggagtgatgatttgggggaggctttgggagcaaaataaggaagagggctgagctgagcttcggttctccagaatgtaagaaaacaaaatctaaaacaaaatctgaactctcaaaagtctatttttttaactgaaaatgtaaatttataaatatattcaggagttggaatgttgtagttacctactgagtaggcggcgatttttgtatgttatgaacatgcagttcattattttgtggttctattttactttgtacttgtgtttgcttaaacaaagtgactgtttggcttataaacacattgaatgcgctttattgcccatgggatatgtggtgtatatccttccaaaaaattaaaacgaaaataaagtagctgcgattggg

SEQ ID NO: 182 - DNA, 4493 bp, Homo sapiens
  B99
atcgtctgccgctttggtgacttctgacagctctctccatggaaggaggcggcggccgcgatgagccttcagcctgccgggcaggggacgtgaacatggatgaccctaagaaggaagacattcttcttttggccgatgaaaaatttgacttcgatctttcattgtcttcttcgagtgcaaatgaagatgatgaagtcttcttcggaccctttggacataaagaaagatgtattgctgccagcttggaattaaataatccggttcccgaacagcctccgttgcccacatctgagagtccctttgcctggagccctctggccggggagaagttcgtggaggtgtacaaagaagctcacttactggctttacacattgagagcagcagccggaaccaggcagcccaagctgccaagcctgaagaccctcggagccagggcgtggaaagattcatacaggagtcaaaattaaaaataaacctctttgagaaagaaaaggaaatgaagaaaagccccacgtctcttaaaagggagacatactacctgtcagacagccccttgctggggccccctgtgggtgagcctcggctcttggcctcctccccggccctgcccagctctggtgcccaggcccgcctcacccgggcgccggggcctccgcactctgctcatgctttgcccagggaatcatgcactgctcatgctgcaagtcaggcagcgactcagaggaagcccgggaccaaattgctgctgcctcgagcggcctctgttagaggaagaagcatccctggggctgcggagaagcccaagaaagagattccagctagtccttccaggacaaaaatcccagctgagaaggaatcccaccgggatgttctccctgacaaacctgccccgggtgctgtcaatgtgccggccgccggaagccacttgggccagggcaagcgggcgatccctgttccaaacaagttggggctgaagaagaccctgttaaaagcacccggctctaccagcaatctcgcaaggaagtcctcctcggggcctgtttggagcggggcatccagtgcgtgcacatccccagcagtgggcaaagctaaatcaagtgaatttgcaagtattcctgcaaatagctcccggcctctgtcaaacatcagcaagtcaggcagaatgggacccgccatgctgcggccagctctgcctgcaggccctgtgggggcatcctcctggcaggccaagcgggtcgatgtttctgagctggcagcggagcagctcacggcacccccctcagcatcccccacccaaccccagactccggaaggtggcggccagtggctgaactccagttgcgcttggtcagaatcttctcaattgaataagactagaagtatcagacggcgagattcctgtctaaattccaagacaaaggttatgcctactcctacaaatcaatttaaaattcctaagttttctattggtgactccccggacagctcaacaccaaagctttcgcgggcacagcggccgcagtcgtgcacgtcagttggcagggtcactgtccacagcaccccggttagacgctcatctgggccagcaccacaaagcctgctgagcgcacggcgtgtgtcagccttgcccacacccgccagccggcgctgctctggccttccaccgatgacccccaaaacgatgcccagggccgtgggctctcccctgtgtgtgccagctcggagacgttcctctgagccccgcaagaactctgcaatgagaactgaaccaacaagggagagcaacagaaagacagattccaggctggtggatgtgtcccctgacaggggttctcctccttcccgtgtgcctcaggcacttaacttttctccagaggaaagcgattctactttctccaaaagtactgccacagaagtagctcgggaggaagccaagccgggtggagatgcagcccctagtgaggctcttcttgtagatatcaaactggaaccactcgcggtcactccagatgctgcaagccagcccctcattgaccttcctctcatcgacttctgcgataccccagaagcacacgtggctgtaggatctgaaagcaggcctctgatcgacctcatgacaaacactccagacatgaataaaaatgtggccaaaccttcaccggtggtgggacagctcatagacctgagctcccctctgatccagctgagccctgaggctgacaaggagaacgtggattccccactcctcaagttctaagccgaaccaaatcctttgccttgaaagaacagccctaaagtggttttcaaccctcagaaacaagctttaggctggtcgcagtggcttacacttgtaaccctagaacttgggaggctgaggtgggcggattacttgagcccaggagttcgggaccagcctgggaaatatagtgaaactcctgtccctacaaaaaatacaaaaattagccgggtgtggtagtgcatgcctgtagtcccagctacttgggaggctgaagtgggaggatggcctgagctcaaggagatgcaggctgcagtgggctgtgattgtgccactgcactccagcctgggcaccaatgtgagaacctgtcttggaaaaaaaaaaaaagaaacatgttttagtagaagttttatttgaaaaagaaaaataagcataaatatattcccagtgctggagagggtgggctgagggactggggccagcacggaccacccaaggcctctgcttcccgccgccaccctcctcgctgccattctctgggctggaatgtgaagcctcagtcactctaaatgaagaattttcttttgaatgttttgtatgtaaaatagcaagtggctatttttaaagttaagtttgtataaatagttagatattctagatttacattaaattgtaaaataaatggacttattgaagcatatcttgatttttaagcttatcttgattttcaaacatgcatagctatttttatcactctaatcagtaaggctactatctagactcgaatgctttcatacaagtgattttcaaaaattagtcaataaaaattgatgtcagtgcaggcccaggcccgcccccagatacactagtttctaggtctggggccagcctagtaattgttactaggcacacaggtgatgctgactcgatggcctgagacacaccccttgagaagaagctgctctggggagacgagggtatgagtggaaagaggatgggcgaggaggccgggcttacctggacactaaggtgatggacggcgtctgctgggcaggcctcggggaggacccctcagctttgctctcagcaggggcccgacaagctcagtgggcagtggcaggaactgagtgccactggaaagcccattccctttatttagaaaacgagctccaggaagccgctactttgtgtccatttctcttgaggaaacttaccaccttggttgagcggcttcatggcagacagcagcgagccagcggccggactctgtatttcggaccccactccagtgctccctgggtcataccaggatctgcctctgtccacaaagatgagggaaaatgatgactgtgctgtgctctctacttcctgcggttactgcgtgattctaaagctgccactcggaacagcgagtcctctgccgtcgagagcagggaggggtagggtggacaggcgatgccgtggaaagacgtctcggtggaaactgccatggtggaaaggtggcgcgcttctcacggctgagttgctgcgcctgcagacggaagctccccacaggcagagctgcttggatgtgtgagtcatgaagccagagaagccccgctccatgagcagtgactccccaggccctgtgacctccctcctgtcttgcagctcctcctggcaccagtccccagggctctcctgttggtagttcctgcttttcttcttggaaattcctcgtggacctcgagatctttaccctaaaatagttctgttgaatttcaccctggcaatgtaaattgatagcttatcttcacagatgccagacaatggacaactcaccatcagtcctctgctcacctgagacaaatgcatgtctgattgcttcctctgccctattgtttatgtgaaaatgcagattcactgagccagactaaggcatcagtgactgttcctctacctgcctctcacatggagattgtgtattcagtgaaaggctgatcaaagacccaaaggaatgcaacagtttatctcttatctacctatgacctgcgagctgcccaccacccccagttgttgcgcctttccagacagaaccagtgtacatcttacacgtattaattgatgtcctgtgtctccctaatatgtatcaaagcaagctgtgcctcgaccaccttgggcacatatcctcaggacatcatcctgaggctgtgtcactggcatgtccttaaccttggcaaaataaactttctaaattgaaaaaaaaaaaaaaaaaa

SEQ ID NO: 183 - DNA, 1440 bp, Homo sapiens
  CSH1
gtgatgcccatctcatatcagccagggacaaagcaactccttgttcatcccagcttggcttttgatccgtgcccatgcctggttcatgccttggacacataggtttcctttaaagaggtggtattgtagccagcttatatttgcatctatagccatgtttctagtccagcttggtgtgcaatactagatgagttaataactggtccttgtttctgatctggttcccattgtgtaactgtgttgattgggaaggtagtttgtgagccatgaaatgcttggttcattggttgcttattgacctcattaacctaggacttgaatatcccaaagggtatgctctttaccacattcaactcctaatttatttgtttaggttatgatgtgattgctcaagcccaatctgggactgggaaaacggccacatttgccatatcgattctgcagcagattgaattagatctaaaagccacccaggccttggtcctagcacccactcgagaattggctcagcaggtaagagtggcttctattccctccttcagggctgatttagggatgatgagtataatccaaggaccagagaagtcttctctgatcaccaccttgggaggaagacatgggtgccctaacactctcgagacctgctgggttaattaaaagctatttcttacccaaacgtaaccattgcttcctccacccatttcctgagtcaaatgggaaagctgttgggtgaagcctggctggctgggcaagtttgactgtgttctgaataagcaccttcactatgggctaagagatcccttggtgtgggggtgatcttacagtagtcagagcagatggacagtccttttcacccttgcttaatagccagagctgtttcatgcctggggcacacacaattctaatgctggactttttcctgggtcatgctgcaacactgatgtcagagcatgtttttaaatgttctgtggcaggggcagtgattattctgggtgtggataatgtaagaagttacagcagagctccattctaaggcacttggctctcagttttctcagagtgaacatgcctcgtagcttgggtcctatggcaggagtgcaataggacatggatatgcatcacctgttctataaaactggttgctggctgggcgcggtggctcaactcgtataatcccaacactttgggaggccaaggcaggcagatctcttgagatcaggagttggagaccagcctggccaacatagtgaaaccccgcttctactaaaaatacaaaaattagccaggcatggtggcgtgtgccttttatcccagctactcgggaagctcaggcaggagaatttaacccaggaggtggaggttgcagtgagctgagattgtgccattgcactccagcctgggcaacgagcaaagctctgtctcaaaaaaaaaaaaaaaaaa

SEQ ID NO: 184 - DNA, 2972 bp, Homo sapiens
  NPD014; DJ465N24.2.1; RP3-465N24.4
ccggacgtaggaggtggaggttgtggaattcgccgttcgaaagcagggactaaaagccccacttcgtcttacgttccgaaaggaaggcgtctgttgagcctttctctcagtcgtgagggaggcgtcgacggcgtgcggaagtcctgagttgaggcttgcgggatcctttccggagaaagcgcaggctaaagccgcaggtgaagatgtccaactacgtgaacgacatgtggccgggctcgccgcaggagaaggattcgccctcgacctcgcggtcgggcgggtccagccggctgtcgtcgcggtctaggagccgctctttttccagaagctctcggtcccattcccgcgtctcgagccggttttcgtccaggagtcggaggagcaagtccaggtcccgttcccgaaggcgccaccagcggaagtacaggcgctactcgcggtcatactcgcggagccggtcgcgatcccgcagccgccgttaccgagagaggcgctacgggttcaccaggagatactaccggtctccttcgcggtaccggtcccggtcccgtagcaggtcgcgctctcggggaaggtcgtactgcggaagggcgtacgcgatcgcgcggggacagcgctactacggctttggtcgcacagtgtacccggaggagcacagcagatggagggacagatccaggacgaggtcgcggagcagaaccccctttcgcttaagtgaaaaagatcgaatggagctgttagaaatagcaaaaaccaatgcagcgaaagctctaggaacaaccaacattgacttgccagctagtctcagaactgttccttcagccaaagaaacaagccgtggaataggtgtatcaagtaatggtgcaaagcctgaagtaagtattctaggtttgtcggaacaaaactttcagaaagccaactgtcaaatctgattagccacttatatcttagactatactttttgggaagtctagagatgtatataatgtgctaaattcaaagtagcaaatctgaagataggcaatgtcaaacccatgaaaatgggagattaatgagctttatttggccgtgcatggtgcctcatgcctgtaatgaggcagatggcttgagtccaggagttcaagactagcctgggcaatgtggcaaaaccgcgtgtttacaaaaaatacaaaaattagccaggcatggtggtgcatgcctgtagtcccagctgtttgggaggctgaggcaggaggatctttgagcctaggatgctaaggttgcagtgagccaagatggcaccattgcactctagcctgggcagcagagcgagaccctgtctcaaaaaatacatttatttttttcattttcagttaacagtgtactcttataacaccgttattagctggtactttggtgatttctattactagtttttctaagctatttacagagtgtttgtagctttcatttgccagcattatgttccccacaaattctgtactcagcatatacagtatagtttatctgctctatttctgtcttatagaaatcatgaatgtggtctgcagacattgatgaagaaaatctgttggtaattgatacatgggctaaagcatcagaggtttaatttgaagtttatgttcacacactgaaaacttagtttttttgttggtagatccatgtgcatgctagaatttgggacaggcactatttgcataaagtattaaagtcaatttttaaactaagcaaaggtacacgttgtaacggtggggcatctgtgaaaaagatgtccctttcataatatatgcaatatattccagatgttttgagagattacagaagaggaggcctgcttcacttgcagataagtttattataattctccagaaatgtgcaggatgtgcattagcaaattgcactgtacttttcactccagcctgggtgacagagcaagactccgtctcgggggcttaaaaaaaaaaaaatgctgtatctaaatgaatctgtgtaattgggcccagatgtgggtttgctcagtattagtagacaaggtctttgttcagacgattaggtgcctaactggcaaatgccttagtttcttaaaacgtattttctgatgtggctttacatttcaaaagtgaacttgattcaacctgagaaaactgattaaaaaattagtttaaatttgccagcagggaagtaaaataattatgggaagagtgtcttaagcctaatattaaatcagttttgttaaggggaaaactcaatagttctgttacttaggctgttagatccaagttgatttttgtgtctacagctaaattttgtttacaattaggctattttttaatataggatttagaaaccaagggtatgtgttttaaaattacactttttcttaacctgtctagctgtcggaaaaggtaacagaagatggaactcgaaatcccaatgaaaaacctacccagcaaagaagcatagcttttagctctaataattctgtagcaaagccaatacaaaaatcagctaaagctgccacagaagaggcatcttcaagatcaccaaaaatagatcagaaaaaaagtccatatggactgtggatacctatctaaaagaagaaaactgatggctaagtttgcatgaaaactgcactttattgcaagttagtgtttctagcattatcccatccctttgagccattcaggggtacttgtgcatttaaaaaccaacacaaaaagatgtaaatacttaacactcaaatattaacattttaggtttctcttgcagatatgagagatagcacagatggaccaaaggttatgcacaggtgggagtcttttgtatatagttgtaaatattgtcttggttatgtaaaaatgaaattttttagacacagtaattgaactgtattcctgttttgtatatttaataaatttcttgttttcattcttaaaaaaaaaaaaaaaaaaaaaaaaaaaaaaaaaaaaaaa

SEQ ID NO: 185 - DNA, 5896 bp, Homo sapiens
  SMG; SMGA; SAMD4; Smaug; Smaug1; KIAA1053; DKFZp434H0350
gcaggcagctgctgtcctatgctttgatacatccagccacttcgttagaagaccgtagtgctttagccatgtggctgaatcacttggaggaccgcacgtcgaccagctttggtggccagaaccgaggccgctcagactctgtggattatggacagacacactactatcaccaaagacagaactctgatgacaagctcaatgggtggcagaactctcgggattctgggatttgcatcaatgcctccaactggcaggacaaaagcatggggtgtgagaatggccatgtgcccctctactcctcctcatctgtccccaccacaatcaatacgattggaaccagcacaagtacaaatgttccagcctggctgaaaagcctccgcctgcacaaatatgccgcgcttttctcccagatgacctatgaggagatgatggccctcaccgagtgccagctggaggcgcagaatgttaccaaaggtgcaagacacaaaattgtcatcagtattcagaagctcaaagaaagacaaaatctcctgaagtctttggaaagggacatcatcgaggggggcagcctgcgcatcccgctccaggaactgcaccagatgatcctgactccgatcaaggcctacagctccccgagcaccacccccgaggctcgccgccgggagccccaggccccgcgtcagccctcactgatgggccccgagagccagagccccgactgcaaagatggggccgcagccactggcgccacggccaccccctcggccggggccagcggggggctccagccgcaccagctgagcagctgcgatggggagctggccgtcgcccccctgccagagggggacctccccgggcagttcacacgcgtcatggggaaagtgtgcacacagctcttggtctccagacctgatgaggaaaatataagttcctatttacagctcatagacaagtgtctaattcatgaggcatttacagagacacagaaaaaaagattgttgtcatggaaacagcaggtgcagaagctctttcggtctttccctcggaaaacccttctagacatatcaggatatcgacagcaaagaaatcgaggctttgggcaatccaactccctcccgacggctggctctgtgggcggtggcatgggcagacggaacccgcgccagtaccagatcccctctcggaacgtcccttccgcccgcctgggcctcttgggcaccagtggattcgtcagctccaaccagcgcaacaccacagctacccccaccatcatgaaacaaggaagacagaacctgtggtttgccaaccccgggggcagcaatagcatgccaagccgcacccacagctcagtccagaggacccgctcgctgcccgtgcacacttccccacagaacatgctgatgttccagcagccagaattccagcttcccgtgaccgaacctgacatcaacaacaggctggagtcgttgtgcctcagtatgaccgaacacgccctgggagacggggttgaccggacctccaccatctagaagctgaagacgagagtgaccgcgctggccgtgaaatcgactgctgcgggtccagtgtccgccatcttcagggttgcacagaatcctccaagatactttgcagccttttttccccctggtccctctcccgttttgattttgtgagagcgtaggtcatcctcgtaaacatatcagtagacctggggttggttattttgtcatttgtttctgtcatgggatggtttggtgtgtggggtggggaggggtctctagggaattatgagactgggaggggggtggagggaatgcaggtagctctctggatggaacggggacaggggaaagagtactgccatgaaagagataggagacacataagaggacagcagaagccctggccctggggaggcttctcggaaggcctggcttcacaggcaggccacagaaggatatcgcgggcacgtgcacccaaagcaagatagtggcttcccttttatatccaatctaatcctgattggatgtccctgaggcccctgctggaaacagccataggagagggcccatggcagtaggggaaagaaggaagaaattccctgcaacaaaacttcagctaaactttgatttgtgtattgtttacataataattttaaagggtacataatgtgtaaagagtttggatagaacctctcttcatactatggttttcgtaaaggatctgttgttgttacggattcattttttccctctatttttataagagcagcagagttgtcttctcaaaacggctgccaagctctgcttcttgggaagatggatgcagtcatgtaggcctgagctgtccgtctttcaccgttaggtgggaggagcgtatgggtggacttgaaggacatggacgtggctggaatgagcacagcattgggtgagcgcacaaggatgaggacatcatgtgatcagttatgggtttgctcgcagggcacccagagattctcaaagaatcctgcagcctctttctgtgctggatttgcttgtcacggagaggcctccctccctttccaccccacccatggggcattatcctgtcactcccagccttgctccacacacacacaggtgggtacaagttccactggaggagaaaaggcaaggatggactttttccccttgtgagaggtttgatacccagaaaatgagctcaaaacctttacattagggttgcttgtaggaactggagcctggaggctgcatctacttcacctgtcactgctgagggagaggaggggagaaaggcccagcaacagcgtacagaggggtcagtcagcaagtccagagagcacatgcagggagatgtttggcccacaccgcacagccccgccatctccagtgggcgatgaaagatgtaggaaaggttgatttcaagatggaaatgacagcgctatccgcacagtatgaattagggatttgctgtgttagttgatttatccatccacacagaggggaggaaaaagacactcgttacttggtgggagattgagaaactgtggtacctaccacaaagtaatagctctgtttatgaagggcaagaaaggctacatttcagaatttgacacagtggagggtattagaggaaatcaaagaggagttgtgtggaaaatcaggttgtgtaaatgaaggtatgaatgctcagccagaggcaagatcagggagatggtacaaggcctgtttgttacatggatgagtcgggtgcctggttgtgtgtgtgtgtgtgtgtgtgtgtgtgtgtgtgtgaagtcagagttgaaattcagaagatcagactatggaaatcactgcccttttttttttaaaagctaatgaactacatacagacctaaaaggccttaatgaaatccgaacaattttcttttactttcaagatcaaaaacatgcacccaacccagccttggatgccaccaccaggtttttgaagcccttttgagtctaagaaggtgagaacaatgtaaccatagaaagcctttcgtgagcagagaaggcttgaatccacaatttcattcgctgaattaaaaaaaaaaggttcagacctctccttgggtgactaagttctaaagatgcaaatccatgtgcagaaagagatggcattttttagttgattatttttaaccaagtgccattaacattcatcccccacatcccttttctaaacaagcttagtgttacttggggaatgtgttgggatggacgatcacatgtaaggcaggaagaataggtcaaaggttgaaggccaaaggtaagaccagagggtttgcgaatgtgggtttgtaggatactgagaaagtgaataaagaggagaaaaaaccatggtattacacatcttgctgagaaaggaaagcattcggatctgctgcaaaaacacatatatccataaagactcatgttattcagaaaacagattgtgaacacaatcacattcgcatgaatcctttaaaaggaagaagaccttaaagtatctgcaaatctgaatttctatttattccttcactgaatatagaaacaatggttatctgattattagagatattattttggatatgttacttattaacttgctatggctggtaaccatgataaagtctgttattaataacaacataattctttttttaaaaaagaaaagcttatttttcattgacagtgtatagatttatctacttagttgtgttttgctattagtgttttaattttttttttaagttgagtgtttgataaattttaagaccctgtccccaccttgttttgagtcctgtgttgactacaggtatatagctcaatttaaaaatcctaaagcaaaagaattttatttataaaagaatcaaacagttgcatgcatgaggctgtgaagtcagatatttagtaataaaagcagcagtgcctttttttgtatttacccattgacccccaccaaatgcaactgttttatattaagaaaatagtaacaattttaaaatctcagagtaaaatctatttcactacatgcttttccccccttgttctgatttaagcagtgtgtacttggcatctctacattgtcctagggacagtggtgttctacaatattatcatgtatgatgttttattggtgctttttattcatagtggcttcttaccagaaacagtaggaagaaacacatgaactgtgtacaagacatgaaacattgctgctgatatgttgttttttcacatgcttttgagttttcactttttaaacgagagccagcaagcaaaatagatgtggctgggtctgcctgtccgggcggctctttgcaccgagctctcaaatcctgtgtattgagggttcctttttggtactcaggattggagctacagctgggcccccctctctcccattcgtttgaagagacactgagggaaacaagggtttcttttgaggtgtccttggctgccttttacgggatgggagccttctccggatcttttgttcttctgcacctcttgtagctactgccggtgcaaggttgtagatgttattccccaggagcctgggcttgggggctgagctgggctgaatgcaaaagcatgcaaccagaaggcgggcaaggggaggaaaagcaggcctggcctcattggtcccctggagatgtctgtagcagtcagctccagcttgggcctggggaagcagcctgaccaaggcgctcaggtgtgcctgttacaagaagaacctgcagaaggataatttgcacatggagctgtgataacactaatgttgattttttttttttttacaagtcatcagagatgtttgcaaagtgagttttatttttttgtaattcctttatctttacttaaaggtgaatgtgtattcctctgggaggaataggaagaaaacaggaatgttaataatgtcgaacagaaaacttcctcccttattaatatataatcctcatgtatttatgcctaatgtaagctgacttttaaaaagctttcttttgttgcatgccctgtgcaggcatctgtattgtacatgcatgcctttcgtcctgttttcctgtataaagttagtgaacaaagaaatatttttgcctagttcatgttgccaagcaatgcatattttttaaatttgtcatatatggaaagagcatgtttgttacatgtaaaagctttactgatatacagatatactaatgtttgaagatgctgttctttgcaagtgtacagttttcaaatgttgttaccagtgaaacacccttgtggtttaaacttgctacaatgtatttattattcatttcctcccatgtaactaagaatcatggctatatttcatatcaacgttatattgaaagtgaagggaaatgattaatacaaggttttgtaac

SEQ ID NO: 186 - DNA, 1431 bp, Homo sapiens
  B-CK; CKBB
gctgttcgcctgcgtcgctccgggagctgccgacggacggagcgcccccgcccccgcccggccgcccgcccgccgccgccatgcccttctccaacagccacaacgcactgaagctgcgcttcccggccgaggacgagttccccgacctgagcgcccacaacaaccacatggccaaggtgctgacccccgagctgtacgcggagctgcgcgccaagagcacgccgagcggcttcacgctggacgacgtcatccagacaggcgtggacaacccgggccacccgtacatcatgaccgtgggctgcgtggcgggcgacgaggagtcctacgaagtgttcaaggatctcttcgaccccatcatcgaggaccggcacggcggctacaagcccagcgatgagcacaagaccgacctcaaccccgacaacctgcagggcggcgacgacctggaccccaactacgtgctgagctcgcgggtgcgcacgggccgcagcatccgtggcttctgcctccccccgcactgcagccgcggggagcgccgcgccatcgagaagctcgcggtggaagccctgtccagcctggacggcgacctggcgggccgatactacgcgctcaagagcatgacggaggcggagcagcagcagctcatcgacgaccacttcctcttcgacaagcccgtgtcgcccctgctgctggcctcgggcatggcccgcgactggcccgacgcccgcggtatctggcacaatgacaataagaccttcctggtgtgggtcaacgaggaggaccacctgcgggtcatctccatgcagaaggggggcaacatgaaggaggtgttcacccgcttctgcaccggcctcacccagattgaaactctcttcaagtctaaggactatgagttcatgtggaaccctcacctgggctacatcctcacctgcccatccaacctgggcaccgggctgcgggcaggtgtgcatatcaagctgcccaacctgggcaagcatgagaagttctcggaggtgcttaagcggctgcgacttcagaagcgaggcacaggcggtgtggacacggctgcggtgggcggggtcttcgacgtctccaacgctgaccgcctgggcttctcagaggtggagctggtgcagatggtggtggacggagtgaagctgctcatcgagatggagcagcggctggagcagggccaggccatcgacgacctcatgcctgcccagaaatgaagcccggcccacacccgacaccagccctgctgcttcctaacttattgcctgggcagtgcccaccatgcacccctgatgttcgccgtctggcgagcccttagccttgctgtagagacttccgtcacccttggtagagtttatttttttgatggctaagatactgctgatgctgaaataaactagggttttggcctgcctgcgtctg

SEQ ID NO: 187 - DNA, 475 bp, Homo sapiens
  HNRPA1
aagttaaatacagtttattaaaaaaaaaaacccattcacaaaatggaatttgagctgcagaacagctcatgtaaactgcatggcagtgataacgaagtacagtggctcagataaaggtcttcacaaggacgttcctgcaaaaggcaaaagaggttgtaaagtattcatataagcagaggtgaatgactacacagttatatccactgtcactactgggaatacctggttggctaataactctttttgcaattggatgagattacgaagtgttttggtttaaggtacagcttgtcattcttttactttgggaacgcagggcattcttttgctgagcactaatttgtaaaaacttacctttctgccacgaacttggacagatgagtttctgtttttaagagctgataagactagtagcagactcctccctagaaaagtaaacaacctttagaactagctctaagaccaagtcccatct

SEQ ID NO: 188 - DNA, 994 bp, Homo sapiens
  ZFM1; ZNF162; D11S636
cgttgctgtcgaaatgaagtgcgcgctgcgacacctcccagcccaccgaactccgccgccatttcctcgcttggcctaacggttcggccaatcccagcgcgcatcaagaaggactgaggctccgccaatcggaggccgccgatttcgacccttcgcctcggcccggcccaatccaggccccggccccgccgcccccggcccgcccccgcggtgccctctctcctccctctttgtgcgtctcgcgccgccgccgcccgccgcgtgagaggacgggctccgcgcgctccggcagcgcattcgggtcccctccccccgggaggcttgcgaaggagaagccgccgcagaggaaaagcaggtgccggtgcctgtccccgggggcgccatggcgaccggagcgaacgccacgccgttggacttcccaagtaagaagcggaagaggagccgctggaaccaagacacaatggaacagaagacagtgattccaggaatgcctacagttattccccctggacttactcgagaacaagaaagagcttatataggtaaatatacgttctgcatccaaatgcactttgagattgttacgatttattctgagcaagatctgcattttttgaaagtttgagattgtagttatcttttttgagatgagatactttcacgactttggtatcatctgtcagtttttgcccagtgagttctgcatttgcagctccttgttttggtctgttcgtaactgcagtgttctccatgagtatcaggaaggtagggtttcacttaggagtaagaacagtccccagtccagcagccacccttttcagctgctgttcattgccagttgatgaggtgagtgtcatctgcctctctggacaggccccagtggagaacaccgcaggtactgtaaaccaagtacttttcacagcgtggcctttcaccataattttatatttctccccctaaaatgtggtcttttactttttataggtactttctg

SEQ ID NO: 189 - DNA, 1637 bp, Homo sapiens
  GCS
gaggcgaaccggagcgcggggccgcggtcgccccgaccagagccgggagaccgcagcacccgcagccgcccgcgagcgcgccgaagacagcgcgcaggcgagagcgcgcgggcgggggcgcgcaggccctgcccgccccttccgtccccacccccctccgccctttcctctccccaccttcctctcgcctcccgcgcccccgcaccgggcgcccaccctgtcctcctcctgcgggagcgttgtccgtgttggcggccgcagcgggccgggccggtccggcgggccgggggatggcgctgctggacctggccttggagggaatggccgtcttcgggttcgtcctcttcttggtgctgtggctgatgcatttcatggctatcatctacacccgattacacctcaacaagaaggcaactgacaaacagccttatagcaagctcccaggtgtctctcttctgaaaccactgaaaggggtagatcctaacttaatcaacaacctggaaacattctttgaattggattatcccaaatatgaagtgctcctttgtgtacaagatcatgatgatccagccattgatgtatgtaagaagcttcttggaaaatatccaaatgttgatgctagattgtttataggtggtaaaaaagttggcattaatcctaaaattaataatttaatgccaggatatgaagttgcaaagtatgatcttatatggatttgtgatagtggaataagagtaattccagatacgcttactgacatggtgaatcaaatgacagaaaaagtaggcttggttcacgggctgccttacgtagcagacagacagggctttgctgccaccttagagcaggtatattttggaacttcacatccaagatactatatctctgccaatgtaactggtttcaaatgtgtgacaggaatgtcttgtttaatgagaaaagatgtgttggatcaagcaggaggacttatagcttttgctcagtacattgccgaagattactttatggccaaagcgatagctgaccgaggttggaggtttgcaatgtccactcaagttgcaatgcaaaactctggctcatattcaatttctcagtttcaatccagaatgatcaggtggaccaaactacgaattaacatgcttcctgctacaataatttgtgagccaatttcagaatgctttgttgccagtttaattattggatgggcagcccaccatgtgttcagatgggatattatggtatttttcatgtgtcattgcctggcatggtttatatttgactacattcaactcaggggtgtccagggtggcacactgtgtttttcaaaacttgattatgcagtcgcctggttcatccgcgaatccatgacaatatacatttttttgtctgcattatgggacccaactataagctggagaactggtcgctacagattacgctgtgggggtacagcagaggaaatcctagatgtataactacagctttgtgactgtatataaaggaaaaaagagaagtattataaattatgtttatataaatgcttttaaaaatctaccttctgtagttttatcacatgtatgttttggtatctgttctttaatttatttttgcatggcacttgcatctgtgaaaaaaaa

SEQ ID NO: 190 - DNA, 601 bp, Homo sapiens
  H3F3B
tttttttttttttttttaacttcaaaaattttattttagtctcatccatcaagggcataggatacctgcatcagctgcaacttctgcttttctcctttgcctctgctcctttacccttaccgagggatatcccatacaggaagccgcctacaaccaaaagctatcttcgccttctgggttgagtgctcaagccaagtgtggaaatgcaagtcactgcttcggcagattgcaagctgcccaatataatctaagagccttctatgccagcctgcagactggagaaggttcactagtgtcacccacttgggttgtcacaggtagtaagcagaagctaactcatcaccgtagccaggtttgtgtactttgtttccagacacgctacagcatagcacgttccaacatctgatcttaatctcattctgaagcacagtgaggaatcaagtgtgcttgttccagagctgattatgaactttctagaaaagcgggtcattatattgcattctttcataggagctcattatcacgacctgaaagatacctactttaccttccctccaaaatatcacatttgaaactaacccaaacttttgagaaagcaatt

SEQ ID NO: 191 - DNA, 607 bp, Homo sapiens
  DDX17
  modified_base (593)..(593): a, c, t or g
aaatatttatttaaccacatgtatatacaactttctaaacttgaagtctgaatttgaaatgacgaatctttaaaccaaaagatacatataccattgacagagacacctatctatacaaacctagcccacgggaggctacatctgtagcaataaggatgggtgcctttccagaacggaactcattaagtacccaatctctttctggttgactcttgtctccatggatacacatagctggccaaccatctctgcgcatccttcgagtcagatcatcacagcgtctctttgtctccacaaatattattgttttgttttccttttcagccattatttcttccattagttggatcaacttgtggtctttttcactttccatgcagacatccactatctggaggatgttgtggttggcactcaactccagattgcctacgttgatctgggtgtaatcacgaaggaaatcctctgcaagctgtcttacttcttttggccaggttgcactccacatcagtgtctgcctatcaggcctgatttggtcaacaattttacggatctggggttcaaaccccatatcaagcattctgtcagcttcntccaatacaaggta

SEQ ID NO: 192 - DNA, 3086 bp, Homo sapiens
  MIR
agttgggctgctggagtgcggcgccaccgcggaggacaggggcagctggcgggcagcgggtgagggggtggcggggacgcgagtggcggccgcggggccccggacaagggtccgcagagctgcagccttcgagggccagccctctccgagtccggggctgggtcccaccagtgacaaggcggcagccccgcgcacaccaaagagaaggcggctgtggcggcagcggcagccccagccatgctgtgttatgtgacgaggccggacgcggtgctgatggaggtggaggtggaggcgaaagccaacggcgaggactgcctcaaccaggtgtgcaggcgactgggaatcatagaagttgactattttggactgcagtttacgggtagcaaaggtgaaagtttatggctaaacctgagaaaccggatctcccagcagatggatgggctagccccttacaggcttaaacttagagtcaagttcttcgtggagcctcatctcatcttacaggagcagactaggcatatctttttcttgcacatcaaggaggccctcttggcaggccacctcttgtgttccccagagcaggcagtggaactcagtgccctcctggcccagaccaagtttggagactacaaccagaacactgccaagtataactatgaggagctctgtgccaaggagctctcctctgccaccttgaacagcattgttgcaaaacataaggagttggaggggaccagccaggcttcagctgaataccaagttttgcagattgtgtcggcaatggaaaactatggcatagaatggcattctgtgcgggatagcgaagggcagaaactgctcattggggttggacctgaaggaatctcaatttgtaaagatgactttagcccaattaataggatagcttatcctgtggtgcagatggccacccagtcaggaaagaatgtatatttgacggtcaccaaggaatctgggaacagcatcgtgctcttgtttaaaatgatcagcaccagggcggccagcgggctctaccgagcgataacagagacgcacgcattctacaggtgtgacacagtgaccagcgccgtgatgatgcagtatagccgtgacttgaagggccacttggcatctctgtttctgaatgaaaacattaaccttggcaagaaatatgtctttgatattaaaagaacatcaaaggaggtgtatgaccatgccaggagggctctgtacaatgctggcgttgtggacctcgtttcaagaaacaaccagagcccttcacactcgcctctgaagtcctcagaaagcagcatgaactgcagcagctgcgagggcctcagctgccagcagacccgggtgctgcaggagaagctacgcaagctgaaggaagccatgctgtgcatggtgtgctgcgaggaggagatcaactccaccttctgtccctgtggccacactgtgtgctgtgagagctgcgccgcccagctacagtcatgtcccgtctgcaggtcgcgtgtggagcatgtccagcacgtctatctgccaacgcacaccagtcttctcaatctgactgtaatctaatctgttgtgcttttgttggacttggcatgtttccatgaactgcactattataaactattaaaatgatagattgtggagaaagtaattattccaacacccatctgccatgcgatgttaaaaaaaaaaaaaaggaagaaaaataacacagctactcctcactgcaaaaacatatccatgcgtagaatcaacaactccagtcatgggaccaggaggagctctgggacgcagacacattccttggatgttgattttttttatgatctagtaaaggaataggtaaagtctttgatgtcagtgaagtggcaacatagccaaaaagttgggtaccttttaggaaatgatgttgtaagtctccttaatgtatcctgaggtaagtttcctactggcagcagattttgtaagaattacttttaagaatttcattctttttgtatggtcatggagctccaaccatttttaataggaaagtcttttgtaaattgttgtcgttttaatgtcatttctgtctttataacttgatcaagaatgattggaaggcaaacaggtttacaaatcaattctgtgacttttaaaaagttgacaatgttgtcagatttaaaccagtgtggctagtaaaaagcagctcactcaatgtgggtggctccctattcctttacgctccccctatccctaccccacaagcctttcgattataaaatactaccaatcttgttataagattactgtggagtagtcaagtactccccgggccttctgagctggtggaatattttatttcagactgaaaacagagagcactctccttgggaagggaaagcggagcttgctgagtgagagatggagcctcatggtgtacaactgagggtagttaactcatcacttctcccaagcactcgatcccagcttcacccactggtgttgctttgcttgaactgttcaagccttttatagccttaccataagtatttagatatggtgtccttttctgtttttggggggggagttttgttgtgtttttttaaagtaagtgcttaagtattaactttgggttgtcccctctgtatgtttcgaaggggttttggttctttttgcttctgttttcttaaacatgttttccactcccacttgggcattttggaagctggtcagctagcaggttttctgggatgtcgggagacctagatgaccttatcgggtgcaatactagctaaggtaaagctagaaacctacactgtcactttactgagatttctgagtatacttttcatattgccttaatgtagcagtaatgtgtttatgcatttgtttctttgcacagacattttgtcaaatattaaaactctacttttttatggcacatattagcatataagcctttattccaagaggtatttattttttcacttgtaaaaaaataatgtttccacgtaaagaactctgttatatcctagaggactctgtcttttatattcgggataataaagactttaaagcaaaaaaaaaaaaaaaaa

SEQ ID NO: 193 - DNA, 1659 bp, Homo sapiens
aaagagtgtaatctcacgtatcactaaggtgctgatgagtcccaaatcataatacctaccatgccttttctgtatgacatttccagctgttggacatctttttgttttttgtttttttctcccctagacggagtcttgctctgtttcccaggctggaatgcagtggcacgatctcagctcactgcaacctctgcctcccaggttcaagcgattcttctggtctcagcctccggagtagctgggattataggcacatgccaccacgcccagccaatttttgtatttttagtagagatggggtttcaccatgttggccaggcttgtctcaaactcctgaactcaggtgatccaccagcctcggcctcccaaagtgctgggattacaggcatgagccaccacgcccggccttttttttttttcttttctttttgagatggagtcttgccctgtcgcccaggctggagtgcaatggcgcgatctcggctcgctgcaacctccgcttcccaggttcaagcgattctcctgcctcagcctcccgagtgtgggattacaggtgcgcaccaccacgcccagctaatttttttgtatttttagtagagacggggtttcaccatgttggtcaggctggtcttgaactcctgacctcgtgatccacctgctttggcctcccaaagtgctgggattacagacatgagccaccacccccagctgctgttagacatctttatctggatgtcctacagataactcaacatgacttcactggttgtccattgcagttaaagcatgactgtcctccaaagctagaaacatgagaatcatctttaacaaattgggtatttctttaattcaacagatattcttttattacttgccattctgctaggcctgctgagagctggggatacagtgagagctggggaacagaacagggatggtcctaatctttatggagaaccattgggtggtccattgggtgagatggacatttctccaggaatcccacaaaaatggaatcatgaacttcaagaagaggtcatgtagggaaaggacacaatggggtaagagtatataacagagggcctgacttagtgggaagagagggtggacaggggagactcaaaatggcttaagcaaaatatcaaagaagagctaagtgaaagtagaatattgaggaaagaatattccctgcagaagccctgtgttgttttttttttttttcgatttataaatagtttatcctgttcacattatgcagaatttcagtgtcgttaatccacaatgttagtacggtaacagaaacataaaggagaaaaaaggcaggtggggggaggttcatagtgtggcctgacatagtctaagggttctctcctgtagtatgcatctcctgcaggcaagtattaatatcacttcattgtttgaaggacagtacactatccaggattcatttattgttcaggtgtcttttctaaagtatgagaaaacaggaataaattcaataatgaatatctgcaattcaaaccaatttaactacaggtcagtggtgtctttcttatctattatcacaaacatcccagttgcctccatctaaaaatttctttcaaaagttaagacacaattaattatatcttattaattccctcaaaagcaaaaaaaaac

SEQ ID NO: 194 - DNA, 772 bp, Homo sapiens
  RGS16
gccaaagagttcaagacacgtctggggatctttcttcacaaatcagagctgggctgcgatactgggagtactggcaagttcgagtggggcagtaaacacagcaaagagaatagaaacttctcagaagatgtgctggggtggagagagtcgttcgacctgctgctgagcagtaaaaatggagtggctgccttccacgctttcctgaagacagagttcagtgaggagaacctggagttctggctggcctgtgaggagttcaagaagatccgatcagctaccaagctggcctccagggcacaccagatctttgaggagttcatttgcagtgaggcccctaaagaggtcaacattgaccatgagacccgcgagctgacgaggatgaacctgcagactgccacagccacatgctttgatgcggctcaggggaagacacgtaccctgatggagaaggactcctacccacgcttcctgaagtcgcctgcttaccgggacctggctgcccaagcctcagccgctctgccactctgtccagctgcagcctggacgagccctcacacacctgagtctccacggcagtgaggaagccagcgggaagagaggttgagtcacccatccccgaggtggctgccctgtgtgggaggcaggttctgcaaagcaagtgcaagaggacaaaaaaaaaaaaaaaaaaacgggggcactagcggggggggaaaaaggggttcgaaaggccaggtgccaagggtccggaacccattttcttgtccaggggcac

SEQ ID NO: 195 - DNA, 612 bp, Homo sapiens
  DESP4; ERG25; MGC104344
  modified_base (593)..(593): a, c, t or g
aaaatatcatggattgaacctcatcaattgatagcagtgagtgactgaagcttccaaatcaagaaaagccggcaccaagaacttccattctaatctagagctgaccagtttgagctgattctctctttgaagagtccttcttgattgcagtgcagtactggcatttctgaatggatgtaagtggagtattttagtctaaaggcttttcaaattacttgaatttttttaaaaattgaggagctttatttctatttacccttccatttttgtatatcaaatttccattgtcattaaaaactgtatcttgaaactttgtgaactgacttgctgtatttgcactttgagctcttgaaataaatgtgatttttgtgtgattaaaacaaaaaaaaaaaaaaaaaaaaaaaaaaaaaaaaaaaaaaaaaaaaaaaaaaaaaaaaaaaaaaaaaaaaaaactcgctcgggccgaattgggcacgagccacccaccacctttggcacagcccctttgtttttacaccaataccaagaattaagggggaagccttggcagttttcacgtttaaaccagactcctttgccggaacccaacccgncaccctgctggcctccgtc

SEQ ID NO: 196 - DNA, 160241 bp, Homo sapiens
gatcatttcacaatgtatacatagatgacaacatcacattgtacacagtcaatagatacaaatatttttgccatgggcgtctcactctgttgcccaggctggagtgcagtggcgaagtcatagctcactgtagcctcaaactcctgggctcaaacaatcctcccatctcagcctcccaagtagctggcactataggcgtatgccagcatgcctggatgattttttttagtttttgtagagatggggtctcactgtgttgcccagactggtctcaaactcctggcctcaagggatcttcctgcctcagtctcccaaaatactgtgattacaggaatgagccacggtacctggccaatagatacaatttttatttgtcaattatccctcaataaagctgggggaaaaggttaaaaatatatacatttaaatttaaaacttccatgatttcttatagtaatgttacggtttttggttttaggttttaatcttcttaccatgtggaatttttttggggtaagatctctatgagttagggtactaactccaggaactaagtcaaattgtcttatcccttaagaaaaggaatatttatttcactcaagacacactgaaagtccaagaataatagctgcaggcgcagcttgacccaggagcacaaacaatgtcatggggtgccccgcttcaccggtgctggctttattcttaggcaggtcttctctaaaaggtaggaaaacggcactgacggccacggatgcatttcctgctcagtgagcccaggcaaagctggtgtctagcaaaggtttggggctggccctcatcagacaaatgtgactgatgcaaatgtttggctgacctgtccaatgagggcctacccaggccttttgggatgtgttgattggccaggtctgggccacatgccagtgggatggagggtgcacggctccccaggggaaggaggcgggtgggacaggggccctgaggacccagcttcctgtggtccaggccgtcagctgtccagcgccatgcctgggtggccagtcttctccccgatgatctggatgctgtctccatcacagatggagcttctgtctgatctggcactgtcgatgccaaattctcctcattaaggtcactctcagtgacactcaggtacatcccagtggctggcaaggctgacgctcccttgtcctagcgacctgcctttcaagagcctttctggccattctgagactatttcccacttgaactgtagagtccatgtgtctatgcacaacagctctcgtgttttatagggactggatgcacagacgtgatctcaacgggtccttctgtccaggaaggggcctgtccttcccctcgctcagtcctcccctcacctcccctcacccccagcagcatcgcaggctttcctccgagtccccgcgctgccgatggacgtgctccctttgcttgttgtggaggtggggggcagctccttacccagagcgggagagattacaggaaaggacggcgcaagccaaagcccctgcttccagctgtgcgtctgggaagagaaggccggccccaggagtcggggtgcattcccctcaccccccaatcctactcggcttcagtctccagggtgggcaggtgggggaggcgggggagggccagacttcctctgcaaggccccgcctctgtccccacacgtggccctgcggcagactctgttccctccctctggaaacggcaggatcctccaacgggggcagccagggggccggggccagaccctacaacccaccagcccccagaggtagctatttttgcagccagccgtgttggtgaggttggtattttaaatgttttgacatttaaaatctgtgttggatacattggtgctgtttaaactatccccgggctgcggtgactcacagggaatgggtttatctcctgaggctgggcctggcctcccctgtccccgctcccagcagccggagtgggaagagggagtttttacctgcccccagtctcaccagcaccttgttgtcctgcagaaggtggacttcggccagagcaggagaacaggagggacgcgggacggcctcagatccggacgcccaagcaggggagggcagaacagacccgccacccagccagggtcagcagcggtggtggtggctctcaggagcccacacaggtggcacgagcaaggggcgctgggctggcaggtgcaggatgctgcctcccgggggtttgagtgccccctctccatgcatgtcctctgatctgttagcagaactctgctcaaatggaatgtgagggtaaactcaggccgcctccttcctgaaggcctctgagtgcttctgagtggagccgggagcttcgatgggagcaggaaggacctccagaggtgcctcagccggtgcccagagggggccagggagaaaacctgccgacattcccacgaccccagcacctctcagtggctgccctgtcccatggccaccgccgccttcattagcgagacacggcgaggattgtcctcaccgggaccatcctgacttggactgttgaggccatgtggctctgccctcccttgtggcaggaggttgggagggaggtggcccctgcagcccagcccagggaatcccacggcagatacccctggactttctaccgcaatcacagccaccagccacagagctagtacaggccgcttctccaagacacccaaaagcttcttggaatcagaaattcagcatgaggatcccgggcagcttggcagagagggggcagcctccgtccccggcacaggatcgaacccgcaagtgtggcagccaaagacgccaagatctggcttgcagagaagagcatcttacaaagaaccgaaggccaaggaagattttaaagccattgatggctgttattccactgccccagggaggggtgccggtttctccattggaagccgggccatggccgtcctggctggttctgctgctgccagtccgcagacatgtccccttcctgttctgagcagcagctctggttgaggaggaggctaggccactgcccatctggggaagtcacagccaccctgccagtgcctacagagtcacgtctcagccaggagtcgcagaaggagcgggactcagctcaggccaggctcaaatccaggcacagccccccttgcgctggagtctttgggcaggacctctaccctgtccaggactcggatcaggtgcagggtagctatgatgacccagccttgtgggttgatgtggaagctagaggtggggagtgggggctccaggtgctgataacaggggccctatacctttcaatgctctgagaggtagctggggtgggagggaggaaggggcctctattagtgtgagctgtcaggacctaggagaactgtctgcacacagctacaaggccagggcttgactctcccacaggacgggccttggggtggggcagccacgtgcttgtgggcctcagccatgcacacaacatgtccagacctgggaacctagagcctagggcctttgccacagctgggacaccccagtggttgtgttccttgctgtgtacaggcgggaccctcgggagggactcatgaaagtaggggagtctgcaaacttcttcccagtcagaggcagggtcgggggcaggctgagggccagcttacaacagcagccaggggtggccatgtcttccgggcagccgggatagggccggacctcctgaacttgtgttgactgagcacctcacactgagcaggcctgacaccccaatcagcacggcaggcatcccagctgagggtgcatgagtcccgctgctggctctgacagcctcgcccttcctctcctgcaggtcaacaccttcatgtccttcatattccccatggtggtcatctcggtcctgaacaccatcatcgccaacaagctgaccgtcatggtacgccaggcggccgagcagggccaagtgtgcacggtcgggggcgagcacagcacattcagcatggccatcgagcctggcagggtccaggccctgcggcacggcgtgcgcgtcctacgtacgtaacctctgggccctccaggggcgggaggcaggccagggctagcaaaggcagcgagcgctgaaccaccccaagcctgggcaaggtttaaagacatagggatggagctgtcaggccaagacccaagggtgccagctcccccgaggggtgagtgccattctgcactccatccctccctccatccttccatctatccttccctccctccatccatccatccttccctccctccctccatccatccttccttccctccatccatccatcccttcctccttctatccctccacccctccctcctcccttcatccctccctccatccatccatccttctctccctccttccctccattcactcctctacctctccctccatccatccctctctccctccttccctccattcattcctctacctctccctcccttccttcctccctccctccatccatccatccctctctcccttcctcccttcatccctccatccaccctccctccctccatccatcattccatccatcatccctccatccatccctccatccatccatccatcctccctccatccctccctccctccatccatcctccctccctccatccctccctccatccatcctccctccgtccatcactccctccctccatgcattctccctccctccgtccatccctccctccatccatcctccctccctccatcatccctccctccctccatccctcattccatccctccctccctccctccatccctgccttcatccatcctccctccctccatccatcctccctccctccatcatccctctctccctccatccctcattccatccctccctccctccctccctccagccatcctccctccctccagccatcatctctccctccctccctccatccctcccttcagccatcctccctccctccatccatccctccctccctccatccatcctccctccctccacccatcatccctccctccctccatccctcattccatccatccatccctccttccatccctccttccctcccttgttccattcctccctccctccatctatccatctctctgtccatctgtccacttgctcacgtgctcacttattcatttgctcagcagttggctgagtgcccaccctgggtctcgcctattcttgctcacaggcatggaggcagcagaggcaggggcatccctgcactctgggggaacaggggctccaccaaggacacaaacacaggcaccaggcaccttcagccagtgatgagcatgaagaaaaaaataccaccaccaccacccctgactacatctggcagctgggaggggctctcagagcaggtggcatcctgcaagtcccaaggaccaggagcccatctgggcaacagagctgcaggcgaggggatggctggagcaaaggccctgtggtgggaggtgcttggcaagaaggcggggcaggggcagggcagacgctgccaacaacacagggcttggagagtgtgatgggaactggagagaatgaagccctttcatgcctgagacccaggtcttcagtttggtttgcctgaagcatttggcttgagctcctccctggtgctggcccattttcagggcttgtttgagggtgtggccagtcacaggagaggcccatagccaagcacattaccctaagagagcctggctctgggctcagccttccctgctcatgggaaccagccagggctttggacacggagctctcagggctggcgaagcccacagcagggcaacgcccatcctatcggaaccctgaggaccagccccagctcaggacggctggcttgccaacatccaaggtgtgtcctggtcccagtgtgtgcctgttgttttaatagtagccatcctaatagatttgaggtggcatctcgttgtggttttgatttgcatttctccagtgatttaagattaatgattaataacatctttcatgtgcttgttgaccatttgtatcttctttggagaaatgtctgagtcctttgcccatttgtgaattggattgtttgttttcatgttgagttttaggagttatactctcaaggttaactcattatcagatgtgatttgcaaatattttctccttttttgtgagctgacttccactctcctgatggcatcctttgatacacagaaattcagtgtttatgttgttcaatttatctacttttttcttttgtggcctgtgcttttggtgtcatacccaagaaatcattgccaaaatcaatgttgtaaagtaattatgttttctcctaggagttttatggttttagttcttatgttcaggtctttaatccacttcaagtccatttttgtatatggtgtgaggggaggatccaccttcatacaagtggatgtcccgttttcctaacaccctttgttgaatagactgtcctttccccactgaatggtcttggtgaagatcacttgaccataaaggtaagggttcgtttctgagatttctagtctattcccttggtctacgtgtctatctttatgccagcaccacactgtaactttgtagtaagttttgaaatcaagaagtgtaagacctccaactttattttcttacaagattgttttggctgtccgggatcctttgagatttcatatgaattttagcacagatttttctatttctgccaaaagcattcttgaaatttgatacggattgcattgaatctgtagagtgctttgggtagtactgacaccttaacaatattaaatcttccaatccatgaacatgggatgtctccctgcatctccctcagaccacgtgtctccttctctgaggccatatctctgtgtctctaagcccatgtctctgagccagtgtctacctccctcagcccatgtctctccctctctgagcctgtgtcctgtctctgagcctgtgtcctgtctctgagcttatgctccctccccaagcccacgtctctccctctctgagcttgtgtctggtctctgagcccatgtctcccccactgagcccacgcctctgtgcctcaggtgcagtgggtctctgagcccacgcctctgtgcctcaggtgcagtgggtctctgagcccacgtctctgtgcctcaggtgcagtgggtctctgagcccatgtcctgtctctgagcccacgtctctgtgcctcaggtgcagtgggtctctgagcccatgtctctgtgcctcaggtgcagtgggtctctgagcccacgtctctgtgcctcaggtgcagtgggtctctgagcccacatctgtgtgcctcaggtgcagtgggtctctgagcccacgcctctgtgcctcaggtgcagtgggtctctgagcccacgtctctgtgcctcaggtgcagtggtcatcgcctttgtggtctgctggctgccctaccacgtgcggcgcctcatgttctgctacatctcggatgagcagtggactccgtgagtaccgggaaccaggaagttgggtgctggacaagtaagtgctcccaaaacagatggtgggtgtggcaggcactgctgaggggatccactcagggcaggggtgtggtgagtcccccggcgaccccctgggcagggttgtgctgtgactggggccgggagaaggccatggagggacaggttcaaggcaggggctattcaggccagactggtgcagagaaagaaagttggtcctaagagagatggcccaggcagtttcccgaaggtgaaagagagacatccctggctctgctggggacatggtgggggtgtcacctcctcatatggcagctgtcagagccccaaggccacccaggttggacccacagggctcagcctggagttatactcagggctgtgacttatcgcagcaagagcaccaatactgacaaagctttgcttatacagcaaagtcagcaaagggaaaagacacatggagtggggtcagcggaagaccagatgcagcttccagggccccctcccagaggagcctcacaggacgatatgggggccgatcacaggggcacccactgcctggcaaaacccctactgtttgcaccaacagttcaggggcagggagcccttctcacccaaaaatggcagagccttcccaaaatccaaggccccaggcaccagccagaggccagccttgccagctggccatcctgagatggcagcttggggcccacttgtgaacccttttctgtgcagtggggctgccagatcccagaataaaaggttccttccagtgacaaccaccagggagggcgcacctacgaccaatgaggaggagaaggcacggggaacagagtgtggcccctgcaaaagcttctgaaactcagggctgactggtagtaattgagctgcctggtgagggagtgagatcactgtggggggaggcaacaagctgagggcaaggtgtgtggctgctggggaggtgtggagggggttactgccctggctgtttggttaggccgggaccagccaagccctggacccttggatgcacagagctgcgaagggcaatgcaggcagctgcaaggagaggcagggatggacaagcagagcccacgctccacctaaagaagcccaggctgggtgggacacggtggctcacgcctgtaatcccagcactttgggaggctgaggtgggtggatcacgaggtcaggagatcgagaccatcctggctaacacggtgaaaccccgtctctaccaaaaatacaaaaaattagccgggcgtggtgggggggtccctgtagtcccagctactcgggaggctgaggcaggagaatggtgtgaacccgggaggtggagcttgcagtgagccgagatcgcgccactgtactccagcctgggagacagagcgagactccgtctcaaaaaaaaaaaaaaagcagcagcagcccaggctgggcgggagcacgacgagaacttgcagctgctcaggagaagccagaccctggagcttgttatgaaatgtccccaaacaaccattctcaaggggtgttttaattagcgtctgagccaccacgtccctcagccgctgtggccccggctgtcaccctgccttggggccctcaagagttctctctgggatctgagcgcctctctctccccgcaggttcctctatgacttctaccactacttctacatggtgaccaacgcactcttctacgtcagctccaccatcaaccccatcctgtacaacctcgtctctgccaacttccgccacatcttcctggccacactggcctgcctctgcccggtgtggcggcgcaggaggaagaggccagccttctcgaggaaggccgacagcgtgtccagcaaccacaccctctccagcaatgccacccgcgagacgctgtactaggctgtgcgccccggaacgtgtccaggaggagcctggccatgggtccttgcccccgacagacagagcagcccccacccgggagccttgatgggggtcaggcagaggccagcctgcactggagtctgaggcctgggacccccccctcccaccccctaacccatgtttctcattagtgtctcccgggcctgtccccaactcctccccacccctcccccatctcctctttgaaagccagaacaagagagcgctcctctcccagataggaaaagggcctctaacaaggagaaattagtgtgcggcaaaaggcagttttctttgttctcagactaatggatggttccagagaaggaaatgaaaggtgctgggtggggccgggcctccggcggcccggctgctgttcccatgtccacatctctgaggcctgcaccccctctgtctagctcggggagtccagccccagtcccgcaggctccgtggctttgggcctcacgtgcagaccctgccatgcagacccatgcccccctcccccaggcagctccaagaaagctccctgactcgccccttcaggcctggcaagctgggggcccatcgccgtggggagtccctcccaccaccctcgccgcaggcagctgcagcccccagaggggaccacaagcccaaaaaggacaaaaatgggctggcctggaatggcccagaccccagcctcccctcctccctcccatcctcacccaggccaaggcccaggggctctgccaggacaccacatgggagggggctcaggcctcagcctcaagatcttcagctgtggcctctcgggctcggcagaagggacgccggatcaggggcctggtctccagcacctgcccgagtggccgtggccaggatggggtgcgcattccgtgtgctttgcttgtggctgtgcaggctgaggtctggagccaggcccagagctggcttcagggtggggccttgagaaggggaatgtgggacaggggcgatggtgcctggtctctgagtaagatgccaggtcccaggaactcaggcttcaggtgagaaggagcggtgtgtccaggcaccgctggccggcagccctgggctgaggcacagactcatttgtcaccttctggcggcggcagccctggccccggcctccaagcagttgaaaaagctggcgcctccttggtctctaggatccaggctccacagagcacatgactagccaggcccctggcttaagaaggtcgcctaagcctaagagaagacagtcccaggagaagctggccgggaccagccaggagctgggagccacaggaagcaaaagtcagccttttcttcaagggatttccctgtctcagagcagcctttgccccagggaaatgggctctgggctggctgcctgcaccggccatgtcgacccaggacccggacacctggtcttgggctgtgttcagccactttgccttctctggactcagtttccccgtctgagaaatgagagtcgaatgctacagtatctgcagtcgcttggatctggctgttgagttgacgggttccttgaaccccacaaaatccctctccaaccacaggacccttcggctcaccaagaacagggcccaggggagtcaggcctattcgctgcacttcctgccaaactttgcccccacaagcctggtcatcagccaggcagccctcccagtgcccaagggccaccaaccccagggaaacagggccagcacagaggggccttcctcccccacagagcccccatgacatagtctgctctgggcggaagagctttgctgccagccagggatgtccagaggtcagtgcagcccctacccctgctcaggagtgggctcagagtctagcaaatgctaaggcccctcaggctgggctctgaacgaggacctggactcagagccagacagggcagcctcagacccttctctggggctcctggaccttgggccataatttctgagcctcggtttccccatctaaggaacagatgtggtcgttccgccctctcagctggatgagactgtcctggaggatccaccccggaacagacagaatggtgtctctcaggatggtgctctgagagagggcagagtggatgccccactgccctagaccctcggtagacgtggggtctctggggcggggtctgtggctgtgactgaagtcggcttttcccgttgatgtcttgatgctcctatctgtgcacttaccgtaggtagggacacgtgtccacgcaccacagacacacccacgacacctgatctcgtatcactagcttgcggccaggtcatgatgtggccccggaagctggccctgcgtgccatgagtgcgtcggtcatggagtccggagcccctgagccggcccctggtgacggcacagccctcacagctcaaacgcccacccccactcccaccatctgcaggtggtgaaaacaaaccccgtgtatctctcaataaaggtggccgaagggcctcgatgtggacttgagtgttgagggcctgcatgtgcccacccacccactcattcattcactccttcattcagacacgcaccgacgcagcagccagcctgcactgggcctcttaccaaagtctacagggctctggtcccagaagctggcgggtggggggcgccgggatccctctgctcacagcccacccaccctccctagtgcttcaaggagcagtgggccccctgcagggcctagtgaccaccgaggggcctgtgtgggcaaaagtcctcaccgtctcctgagcttcagtctcctgatctgtgagctgaacacagaggacgctcagtgaagcggggagcccggggtcccatgaccgctcagctcagatctccatggccccctctagccagcccaggggtcctgtggttgtgggggagggggccatggccccatcgaggccttagcagtggacagataggcccgggtgcagtactgagcctctggcctgggcccagccccgtgcaggctactgaggagacagaagatgcagctgaaccctcacccccagggcttctgctctgaaaatgagggttcccaggcacctcccagacccaccgtttccaattctcccccgccaaggcccgggtcattctccatccctggttgggcggctctggctctctgctgtgctcctttttagggcaccaaaagcttttctccggcttgcctgagcctgagccacaagaggccggtgacagcagagtctgcagggtggtgccctggggtctttctcataagcctcctgggcctcaggattaggagtgctgggctcaccctgtggagctcagcaaaagaagcatttgcttgggcttgaacagtccaggaaggctgcctggaggaggaggcaggtgggccagtgggaggcagagcctgagcaagggagagtgcaggagtgaggggtctccccagggacatgaggggctcagagtggctggagaggagaagggcaggtgctaggggagcaataggggagggagaaggcgggttgagagcttgagggatttgagcgcccatggaggggctgagtaggggcctagggggagaggggaggagccttggggccctcgtggtcaggagcctgccatggttcctgggtcctgatggcagggagcaccccttcctgagggggtcctcttggccgtcctcagcagctctggccctgcctccacctccctgcagcacttagagattctctaagtgttgttttcctgtgcctgggggctcaggactccttcctttgggggcagccaggtggcagcagggctgggaggggtctgggtgagggtggggagataaactataaccctgatcatctaaagggatcttggcacacgctgccaggcccctccctcccagcacccagcactcaccttcgcctgccctcccaagcggcgctgccccagatccccaccaggctcagcctgtccttatctgtgctaaagcgttagtggccacagcatctcctggtaacaaagatccccacaccttaacccaaaggacagcagaaacacaggacaaccccacccaccctaagggcatggtcccccaccttcccctccgagccgcacctgcccagctcagaggtggggatggcttgagtgaggactcctgggcccctgattcagaagaggctgcagggtctccgggaagaccctctcacccaacagctgctctctctaggaagccttaaacccccgacagagggaagccagagccaggaggaggccggatggggacgaggagagcctgctgcctcggggtcccgcttcccctcggctgtgcgtggccacaaggtgggcacagggagagggcacccaccatgtggagcccttggggggcctgtgttgtgcacccagaggctgcgtggcgagcactgggtgaagaggggatgccagctcttcccccggcagcacagcacagccatgagcgcacaggtggtgacgcacagggtcctgggctggactccagctctgccactgtgagctgggacgtgggataaggtggaagttagcactcagggcccggcccgcaggaccaaggttggccgcgtcaggggagctgggagggaggcggaggctgccttccttggcatctggccttggcggccaggccagtgtccctcctggcccagagcggtacccgggccctcgactgctgccctccacgggctccctgcctgaacctgtccacaccccgattcgtccccagagttggacactccgtgatgtttaaggttaaggaattggtgtcaatcatgagcttcatgcctggctgcccggctccttctctgccccggcctagtctgagccccctccaccaacagtggagcctggtgccacccgctcctgtcactctggaggtggcccagggtatagcactgcctgcaaccaggtccctgctctcctctccactctagagcctctctccccttcaagcctctccctggtctgaggctccctcccctctgagcctccctccgagcctctcttccctctcctctcttctccctgctcctccctctccctgcttcctccctggagctgggggctgtctctctgactgcatctctggaggaggaggaagaggattgggagacaggactttaagcgcagattctgccaggcatcacctaggagccctggctgaacccagctgtgtgtagggagcctccggccgccctggggctcagcatccttaggtcattgttcccatttgactggccaaggaagccaaggctctggtaatctgccaaggacccacagcctccctaagcttgaagaccatggtcctatcagccctcatgtgctcccggtgacccaccctgcaggcccacaggccgaaggcgagctccacctgtttcacagctggggacgccagggagggggagagctgcacggagctggtgttggttctgccctcgccattgtgggaccttcagaagaccccacctcccaaggaccgtgaccccctcctggggagggcacgcctccccaggagctgccaggtgagaaaagcacccagcctccagcacaccaagacccaggagcagtgagagggcagagccaagctgctgccccagggactggtagggaccactgatggcagtggcaggaggaagctccaggctgcggggctcagagagggatgaaggacagggtacgggttgctttgcccccaaatcagagatgctcacccggcaggagaccctgcatgcccaggctctcccacctcagcctcagacgccgagctgtgtagacactgtccaggctacacccagagcctcctggggtctgcttcagcctctgggaaccatttggctcctctcttccccctggggggcatggggaaagcatgccagggaggaacgctggttgggcagccaggcagaggtggatgtggcgggctctcaccccaggcaagttgaccaaaagggtgaccgcagcaaggtgggctctgcaggggaccccaggacgctggtcaggctcaggggcagggctggggcgcaggttgggagggcagaggtgaaggagcaaacacaaggcatgggtggtctcggatgacgggcaccctcccccacccacccattcaggtcctcgccctcattccccacggcaaattttcacacgggctgttagccaatagctattttttaactctggctacatttttaaagtaaaattattggattcagacaacatagttctccttaaagtaagaaagtctgtgcctaaagccgggaggaataagtaccatttggtggtgagtttcagtatcaccccaataaatcatggggtgccacatggcatggaggcaaacccagatcaacaaccgagagaacagtcactgcccctcctcctgcccgccctcctccttccactccgtgcttccctctgagccccccactctccctcccagaagaccgcctagccccacagccctttcctttctctggggtctttgttacattgaccaccatcccgactggcttccacttggtttctcccggcttttcgcacacccacggctcttcatgactgagacccagcaagcgggagcagcctgaggtccctgtggtctttccagttctgcctctctctagggatccctgggctctgtgccaaggaggaaggagctggagcagcgaggcaacaaggtcagcctcctcccgggtgggcaggtgggagcagcagtaagatgcgtggggaccaaggacacaccaagcgtccttcataaacaccccgtaggatccacagccacacacacgccagcgtttaaagaactgaaaaaggctgggcgcggtggctcacgcctgtaatcccagcactttgggaggccaaagcgggcggatcacttgaggtcaggagtttgagaccagcctggccaacatggtgaaaccccgtctctactaaaaatacaaaatagctgagcgtggtggtgggcacctgtaatcccagctacttgggaggctgaggcaggagaatcacttgaacccaggaggcgtaggctgcagtgagctgaggttgcaccactgccctctagcctgggtgacaagagcaagaactccatgtcaaagacagagagaaagagagatagagaagaaagaaagaaaagaagaaagagaaagaaagaaagagaagaaagaagaaagaaaagaagaaaagagagagagagagaaggaaggaaggagaaagagagagagaaagagaaaaagagagggagggagggaaggaaggaaggaaggagaaagagaaagaaagaaaaagaaaagaaagaaagaaagaaagaaagagagagagagagaaagaagaaagaaagaaagaaagaaagaaagaaagaaagaaagaaagaaagaaagaaagaaagaaggttgaaggaaggaaggaaggaaggaaggaaggaaggaaggaaggaaggaaggaagaacccagccaccatctgcttctgagctgatgaggccctccctcccatccccacgggaggacacccccacaggaggacgagaagacacccccatggcaggacccccctgagggctgacagccccacagaagtgccttctgcgccgggtgtgtccctgcctcatcccccttcccacctccctgcctctgcctccatctcacatagcagaggggtcccccaaacccccctgcccagccccaagccactagggcagaggcagggccttgttgacagccaaacgctgtcctctgggggacaaagaagaaagcccctttcccaaccacaggcctccagtgctcctgctgcccctgttccctgtgtctcctgggcaggcagatgggcgggctcacgtcagaaccaccagggagcctgttccagaccagtttcccaggccccagctgagccccaggcgatcagaaggtagggtggcctgggaatctgcatgttaacgacttatccaggagagtcagatgcgccctggggtgggagagccacctccctataccttcccatccatccatccatccatccatccattcattcattcatctgctcagtgctcctcgggacctggctgactcggcacccccctggctggcacagaacggagggtgtggggctctgctgccccagcccctgcaaggaattctcacaacccccgttcactccagggcataggagatcactgcaccccaaccggaggaacactgacattgacgacaacatcataggaatggaaatacaaccatggaattccagctcagtcatggagcgggagatctggggacactggccgggcagcctgccccaggcacccctgaactccagtcccctgaagccagagcccgggtcaagcccctccccacccagcaggtctgccgagctccgccctgttccagcacagagacagaagcccatcggctaggaggcccacccaggaggacagtgccggcccgtcgccatcgcgaggcaacaggggagctcttgagagagaattctatacactctaaatacctctgaaggaagaaaaaccagccacagccattgagacctgagcttcctgtatagaaaatgttccctcctgcctccaccctctctcccagctccccaactccctgcaattatgactggaattccagtttttatcagagcaccatggaaaccatggccaggctgaatttatgaaaggaatgacgccaagcagagagagaaccggtgaggggaaggcagggagccaaggcagggcaggagagcaaggcagacgaggaggggctggcacccgcagggcgcccgcagcacgtggtgagtgggccctccccagcacacgtgcacgtatacacaggcaccccatgcacatgcacacagcatgcacatgtgccagcgcatgcatacacacacagacacacgtgtacacacaggcacacttgtgcacatacatgaacccatgggcacacacccatgtacatgtgccagcacatgcatatacacacagacacacatgtgtacacacaggcacacttgtgcacatacatgcacccacatgcacacatttacactcaactcacacacacacaggcaaatgcatatacacatgcctgcacgcacacacaggcatggcatgtgaacatgagtgcacacacacaagtgctcacacccgggcacattcagcctgcatagggcctcccatctcaccaggaagggctcgttccttgggtctgtgagaccagccgcttctcatcctgccaggccaactaaccaggtgactagcagagccactggggacacccccagccaggcccagaccccagccaattacccagggcctggagcaaggccctgtcagctcaacccccatcatctgacctggttcaaggcccatggccaccgagagccagtctgcagctgggcaaaagggcaggtgccggagccctcagggtcagcagctgtgtctagagctcgctggacaaaggctaggccaggcacacttcagaaagcacctgcctcccacccactctggtcggtcccccaccccagtcactatgtggcactgaggtctcatctcgggccccagtgccaggctcttggccagccctgtcaggatggggcagaaccctgggggtagggagggcctgtgactgggccaccacgctgcaagtacagcagtgagaatgaccgctaggaaaggacactggcggcaatagggggctctgcccagggctctctgcctgggctggggcaggccggctatcaggcagtcgcacccccagagcggcctcgtttgttacccccacaggcaggagttggataaatactcagcctcctccccgctccaggggagtcactggagggtgctcagcaggggcactaagccatcagcccttacaggtgcatccccttccctactccctgtcttcctgggtcacctcccaaagaaatgaacagcttccacatcaaccctggcctcattctgcttccagggagagtcagccaaaaacatcaggagacagccatggtgtagggagcatgaggaccgggacccaggcactggcacgccagcctgaggaccgggatccagacaccggcactccagcctgaggactgggacccaaatgccggcactccagcctgaggaccgggacccagacccagacgctggcactccagcctggacgcccgctcaccggcatgcgcacgggtgaatatggagggaggtgggggaactaggaaaggaagaggaggtcccctggagggaaaggcgtggaagctgaggcctggagggggcagatgggaggaatgttctgggcaaaggggcaagctcctggacctgttgttaccatggccaggactcccctcacccagctgacagcacagccccacagagcccccaggtgagggcctcatccccatcctcacacagtccccagggagggtcccccctcacagagtccccaggtgagggcctcatccccacagagtccccagggagggccccgcctcacagagcctcatgcctgcagacagggccaggtgaggtggacgtctcttgcacctacacatcctcgcgacaggaggatgcacgtcgtacagatggggaaacaggctgggaaagggagtgtgacctgcccgtgatcccagaggtgtggctaccagagctggaactaaaaccggagcccttcaccaaatccaggtgtgactcgaagtcctgagtgcacaaagatcacacgaggacagaggctcctgggcctgcacaaaccacagttccgggcaccccagctccagccggcccgcacgctccaccagggcctgtccccacacctgccctgggacagaggctctcaccccatgcagccacgcagagaaagaccacccccgattcgcacctgcagaggtgcccaggggggtcccgcctccccagggacagcgagtcacacctgccacctcccagggcagtcacaatgccagcccacaggagccgcaggagctttgccctcctaaagatcatgttgttggaagaccagagccttcgggggcttagttatgctctgagggtcctaaagccacgtgagggtagctaaggccaccacagtcccccactcggcgggggagggagggcaagaatgacattgaaggtggcaaacaaggaaaaacaaggaacggggtctctgccctctctctcgggggcccctgacctctctggggtctctggcctctcacggggtctctgctcttttgggggtcactggcctcagagttctctgccctctgaggagtctctgccctcctggggtctctgccctctccgggtctctgctctcttgggattgctgccctctgggggtctctgctgtctcggggtctctgccctctcgggggtctctgttctgggggtggtctcttctgtctcagtgccatgtccctgccttgcctttctcctctctggtcgtcctagctcccaggacctaagctggccttggatgaacccagtacggtgcctctcctgcctgtatcggggcatccgggcactgccagcgtcccattactggactctggtcaaggagcttggtgtggataacgggaagttttggaaacttcccacccttcccagagggcttaaagggactggggcgaacgcccaacccagccacagccgtccagggctttgtttctgacatgccttaaaaggggacagagtggccgccgaggggacggagcctgccgtgtcccgtgtgcagcggcggaccaccaggcagagcgccaaggggagtgtccggagatccagcatgggaagagccccctgccacttccagcaaggagcacacaggtgcatccgttctttctgccccacactttctagggacagcaggccgagcccatggtgtgcgccgtcagcatgggctctgcagcctccgacccatgtgcggcctgcccggaccctcgctcctccgtgtgcggctcgcctggaccctcgctcctttgggccgtcactctccctactttgtagacctggaatgccatccctgccccagctccactgcccatgggtggccatccagcagccacggtggagtacacgctgcactgtggtgcccaggggccctctatcacggcaggactccccaacgcgatgtccccggggttcactgccccagccctcagtggcctgcctctctaggcattgcactggcagaagaaaatgttctcgtccaagctcacagccaccaaggtcacaggctaccaaggtcatggccacccacaccgggcagctgacctccaggatcatcctcgggagatgcccgcctggccccacctggccgccctgccccatttgccccatcaccccacaccactgcactccagcctgggcgacagagcaagactccgtctcaaaaaaacaaaagaaaagaaaagagaaaaagaactctatgtcctcatttcaaatgcagggagagtctctcggtttaaaccgtaagtgcccttcccaactcggcagacccgccccagtgaagagcattttcatgacttgggaacaggacactcaccttgccactaggcaggactgtactcactggctcggggggcgcccaggcaggagacaaagcattttcccatggcatatggatggcttccgtgtgctgcatgactgggcagtgtgagaaaaacgcaacccccagtgactgctgtagaggacaattcagccaaaaatcaaactgccaccgtcatctgctgagaccttgatttcccagggcctggtggtgctgaaatactcagaacatcctgaatgaatgaatgtccacttccttcaccagctctgtgctggggagggggcagggcctgcgtctgatcaggagctcctcccccggggaccagcctggaaccccttatagcgatcaggagacacaggagacaccctgaatgacgacactgagctctttccaatctcttgcttgtcccagcgagtacagtgagcacatctttccctgtgctctgggcaaacccctgcggcagcagctcctaccgtgaaattggtgtttctgggtcacagggtttgtgcctttgtgattttgttgctattgccaaataccctctgcagaattgtgccaaggcacctccccaccagcctgagcatttgcagtgaaacgctttagcaatcctgacatttctgccagcatattccacagcatgctctctttgccacattaatcaacaggagctcagaggaaaacttgaacttcaggctgagccatttcctgcaatctgaaaaatgaacgtggccttcggacacagggtggtcccttgccagggactggatggaactggttcaattccccgctcctgggcttcctggtgtgcaacgtgagccatgctcaccccagggtggctgggaaaaaacgccggtccgctctgagcattcgtttcagtgatggctgttcttgttcacgtgagatgtgccaactctacaatactaaaccgttgggagaagcttcaaggggacagcacctggggaggggcagtggcgggctccaggttgcccaaggctgtcatggagaggaggagaccccagtccagcccagccttgtgcctgcagtggaggttccagttgtgaaggggctccaagtgccttgttcatcctttgcttgataatgaaccacctctgccaggtgccagctgtactgtgcacctgcagctccacaccctctaggcaccagcccctccactctttggcctcttcgacagggaaccccgaggggacagtggagcaggcctggggctgttccaggcagcaggggggcgcctgggtcagcgtccccacccgctgccctccccggccttccaacttgctgtgtgcacattaacaacatggacggtctttttcttttattataaaagtgattcattctcttgtgaagatttaaatatgaaagagtggatctccgctaatcccacccggtgatgatagcagccgacagatgggcgagcatagagctcagacattgccagcagcgtcagatccttatatatccagagcacggctcacacgccaccgccctgctggctctgtcagccgcatggtcctccgcgacacctggggctctccctccttcctttgtgtgcacaacctcaaagccattttttccagacttggcgtgaagatgattttctgacacgttgatgcttctgaagcacaaggagggccctgtctccacggtgtccaagcagaggctgacatcctttcaggagggaggtgattcgggcgcagctgggctggcgggaggcatggaggctgagtccccttcctcactgctctctacctggagaagaaaccaccagaccatgaggccgagctggggaaagttccggggggctgcttgggctctgtgctccctccactggggcaggcggagggccctgcgtgctccttccaggcaggggctgaggggactgtggaagccacgacaggggtctgtgtgaacagaagacccaaggacaaggtgccccagcactcccagccactagcaaggacaggcaattttcaaaacttctccccaaactacaacctcaggaaaaggggtggagaaaactcctttgacagagatttggttttcaccaccatgacaggacaatgatgatggatggaagctgtggctgggcgtgggaaggctgagtgtgcaaatgtgggtggagttctggggccccgcccccgccagtcttccacttggtccctgtgaggacccacatgagggaagtgttgcttctggcctcagaacccaaggcagagcaggctggagtcccaccccatggatcacgagcccacgctgtgaccctgagtcctggacatgcgcagagggagggtgtgcacgagcccgggagctcctgtctctgtcttaagagtggagcatgtcttaagagctggcatgaggatcagagggtcccttcagtgcggccttctagaagaactacagcaaccaggccctcgcaggggggagatgcacctgctggggctaaggagcgagtgaagccagcccctgagacacatgctcccaaccccatcctcacctcccaagagagggggagcctcctgttaagcatccaagtcccaagtcaccggccggcatcggctgcagctctctgtgtgtggagacatctcattctggtgtcttctttacacaggtcagcgctcacaggctcggctgtgtctcaagacccaattccttcgagtcactgagatgcccaaggacaagggcaacagagagtgtgaaaagctggagtagacaggacagaaaacagggtgcagcgtcccccaggttggcagatagcccagccccagggaccccacagccatggcaacctgtgtgaatgagccccaggagcagggcagtacacgatctgcgcgactgtgcggggcagccctgggtctctgcctcaggggagagattgtgtcctcgccttttgtggtttctagaggttcctgccctccttggctgcacggcatctcccagcctctctctcccttccgtcgtcccctctcctcctctgaccctgaccctcccagtccctcttagaggggctgtgattaaactgtgcccaccctgaccatccagaataatctcccatctcaaggtccttaacagcatgtggaactgcactagccgccccaaggcccccaaaaggcaaccctggattgggccccccaagttgcctgggattcatggccaccacccggctcgacggctccagaccgaaatgcacccagttatagaaacagacagttgcctcttgaatgtgcacatgtgtgaggagagtgtcacacccgtcgaattaaggtggacccgccatgagtgggggcaatgctggccaatgcccacctgcccagcacccacagctctcggcctggggctccctctgtctctggagcccgcactaaagtgtgcgtctccatccacgactggcagggcttggggcatagacatcccgctgccttgcctggaggcgccccaggcctccactcccacactgtctcagggctccccggggctcggctctccttgctcacagtggtccgggctggggttccttcttggttgcatttccagctgtgttctttccttcactttctcactctcccttgcctcagggtctgcatctgggggtccactggggaggactcagcctctcccgcgtcctccatcccacacacctgtccctgggcagccacggggaacaggagcacaggggacagcaggcagagggcagcgcccgggcgaaggggactttcgcccttgcttcatgcagccctggcacccgcagcagggtaagacgagatcccagaggaggagtcttggccgcagaactgcagggccaaggcaccagccgctcgggggcctggagagctcaggtcacaaacttgaagtcagctgcccaggaagcagcctcagctgggggtcacaggccaactgggcagtgcccttggccacacctgtggaaggaggacagaggagggcagggcggaggagggaggtgctgggctgcaatgtcacctctacagacctcggctgatcccaagggggtccacagtggatatggtccttcaggggtgcccttgaaggcaggaaggggacaggactttatactgttcctcccaccccttcgagcagtcaccaactgcagcccagatgaggtcaacaggtacagaaaggagggggtgggacaggaaggaggggcgggacaggaaggagggggcgggacaggaaggaggggcaggacaggaaggagagggtgggacaggaaggaggggcgggacaggaaggagggggcgggacaggaggaggagatgggaacagggaggtggaacgggaaggaggaaatgggacaggaaggaagagatgggagcaggaaggagataggactggaaggaggagatgggactggaaggaggaaatgggacaggaaggaggagatgaggcaggaaggaggagatgaggcaggaaggagatgaggcaggaaggaggagatgaggcaggaaggaggagatgaggcagaaaggaggagatgggacggaaaggaggggataggacagaaacgagggatcagggtcctattctaatctcctgggggcatgattgcagggggtgacatgattacttccagccagccctacatgagccacctcgtccatggagtcagccccgccagggcagcagagccctgggttcgcacagggagccagggtggcgtggggcctgcattgcagactccatttgtccacatcaatcacttctctacggcccaaatcacccttagttgcccagttcctgctccgcggcagtctggctcctgctggcgccccagccatctgtctgcattagagaatgatgcttgccagggcctcagggaggtggcacggatgggcaacactgtgctcccggaccaggtgacagacaccacctcatgccccatggcatggacctccacctgtctgatggctttgccccagcctatctgatggcatggtccctggccagtctatctaatggcgtggtccccagcatgtctgatggcgtggtccccagcctgcctgatggcgtggtccccagcctgtctgatggcatggtccccggcctgtctgatggcgtggtccccagtctgtctgatggcgtggtccccggcctgtctgatggcgtggtccccggcctgtctgatggcatggtccccggtctgtctgatggtgtggtccccagcctgtctgatggtgtggtccccggcctgtctgatggcttggtccctggtctatttgatggtgtggtccccagcctgtctgaaggtgtggtccccagcctgtctgatggcgtggtccccggcctgtctgatggcttggtccctggtctatttgatggtgtggtccccagcctatctgaaggtgtggtccccgacctatctatctgatggtttggtccccagcctgtctgatggcgtcgtccccggcttgtctgatggcatggtccccggcttgtctgatggcatggtccccagcctgtctgatggcatggtcctcagcctatctgatggtgtggttggtgtggtccccagcctatctatctgatggtgtggttccctggcctattcgatggtgtggtccccagcctgtctgatggggtggtcctctgttggctggtgtgatcctgcctcttgtctcacatcgtgaaccctggcctgcaggaggtgacccaaggctgatgactccttctccggggcccttgcaccacacagcctggccctgattacagcccctgggctcctgtacctgtcctcgcagcccccactctgccactttgcatttgtctgtttcactcaacacacatttaatgagcacctactgtgtgtaccaagcccagtggggaacagcacatcaatgaggctggtgcgggaggccttgggtaccctccgtctggctccccgccccagcgcatgaggctgcctctctgggtctcggacgcccacaccgcagtgtctgggagaaggcctggaagcctgcatttgggcagtggctctggggcccggccttgctggcttccggtggccccaggcaatgactcctccctgtctccatttacagatggggagaggagctgaggatggtgggcccgtgaccctgagtggccagttcattccccaggccctgactggtgcagcaagaaagagaatccgccttgggttgggggatgtggcatgaactttaagatccacccttttccaccctgggatcctggcccccgtcccgcatcccagccccagccaggacagcccctggccacaccttctcggcacatcaagagtcatgagaggcagcgtctgccaccaggaggcctcgtcccaccgggccacctggccagggcagctgcgacaggaggcagagctgaggccctgagccctcctctgcccattcccagctcaccctcagggttctagccctgtgtcgctgcccctctgatccaaaaacttgccacaggtcccctccctgccatgctgccctctgagtgacacccaccccctgcagcccccacagcccccaccttcccttcagaaagcaggagctgttggccccggggccccgcccacaggccacggtgtcagtggtggctgaagtccgccgtgctcaccaatcctctgcagtctcgcccctgcaacaacagcacttgaggaaggaactggccacgcagcctttcatgaggtgggaaactgaggctcaagggtgtctgtactttgaactggaccaccccgctgtgagaaggagcagggcagagactgggagcacccaccctcccgcaccctgtgtgctgacatgagctcatccctgctgctgcagggccagagagacagacggacagtttgacggtggtccctggaagggtcgacacaaatgaaaaaattttttaaattaatcttctttcctgcaaaagggaaaacagaccccttttctttcggcttttagttagaaagctcttcgttgtggattctttgaatgtgggtaaatctttttttttttttttcttttttttgtgatggagtcttgctctgtcgccaggctggattgcaatggcacgatcttggctcactgcaacctctgcctcccgggttcaagcgattctcctgcctcagccttctgagtagctgcgactacaggcgcccgccaccagcccagctaattttttgtattttagtagagacagtgtttcatcatgttggccaggatggtctcgaactccctacctcgtgatctgcccacctcagcctcccagtgttgggattacaggcatgagccaccatgcccagccaaatgtgggtaaatctttttaaaagctgaataagccccctgcctgggcacaagccagggatgtctttcccaggggcaggatgcaccatctttgaaacgtggacatcaaggaaggcggcacctgcctccccgctccctgcccaagcccaggagcccgactttggcgggcgcagtgcttcagaaccacctcccgtcgtagagacacgaggagtttgtttttcctttggataaagccaattagctggcacagatggtcaccccagtccccaggtggatgtgtggtggcgtctgtgtgacaaatggtgccgccaagccgtcccacgggaagacgagctcctgtttgtctttcaaggagagatgcacgtagcggactgcatccgcccggctgtgtgcaggctgagatttctctctgtctttgcaaactctcagcagcttgcacgtcgtgcacctggcatcctggtttgatgctcaatcaatggcaaaacgggtttctttcttttctgccttagtggagaggtctgggggttagcaagagattttgtttttaattgtatttctccaacaccccatgagatgctccaactccatgtgactaggaaggggcaagggaggaaacctgtggagtcccctgcacaggacgctgtctccgccctgctacgacgctgtctccgccctgctaccatgcttattcctggctgctgctttgctgttgactctcacaggcagatgaggtgtctgctcagagaagagcccaggtgccaccgagggaatgcaacgtgccacaccccaagacatgacacttgtgagaacagtgtggcccagcccccactccgggcacagcctcggacaccctgcccgcctccgcccatggaggtgcggcctgcaaagcgtacctgccgccgccttcccatccctcgggaaagccagcctcatgtccagtctaaggagaattctaagggatgctgccagccacctgcaggctccgggctgagctcaagggaggggccaagggcggctttaaaaggccttcactgatcacttgccaagaagcccaaaatagcttcccaatctaccagcctccatgtgcgccgtgaccgggacatgttctgagtcttgtcttttcattttttgtgtttttcaaaagtatacaacttataaataagagtataaagcctggcgtggtggttcacgcctgtaatcccaacactttaggaggccgaggcaggtggatcacgaggtcaggagttcaagaccagcatggccaagatggtgaaaccctctctaccaaaacacaaaaaaatagccgggagtgatggcgggagtctgtaatcccagctactcgggaggctgaggcagagaattgcttaaaccttggaggcggaggttgcagtgagccaagatcacgccactgcactccagcttgggtgacagagtgagattccgtctcaaaaaaagtataatttccagtaggtaacacgtgcacgtggagccacacacaggaggcaaaagcaaagtccacgtcctcccagccccaggcctcttcctcaaggcagccctgggaggcgtttacatgctcctagagggatgggacaacctggtccctcctctcccacctacggacaatttgtccctttgaatcaggagaattgggtctggtcagggaacctaaggctgtttcacactgacttattagaactaaattctaaattgaaaggaaaactctaactttccaggcctaagtaacaaaaggaccagaggctactccctttgcaaacccggcagatggaaaattaaaagtatctctgattggttgctttttgcaaccaattagatgtttgcataggagtgtaactttgttttttgtttgtttgtttgttttttggctttttgtttgttttcattttgttttgctttttgagatagagtctcgctctgttgcccttgctgaagtgcagtgggacagtctcagctcactgcaacctctgcctcctgggttcaagcaattctcattcctcagcctcctgagtagctgggattacaggtgcacgccaccacacccagctaatttttgtatttttagtagagactaaagcagggtttcaccgtgttggccatgctggtcttgaactcctgacctcaggtgatccgcctgcctgggcctcccgaagtgccgggattacaggcataagtcacagtgcctggccaggagtgtaactttgtaacttcacttcagcctctgattggttgctctctgcagccaatcagactggttgcagtcaccacttcatttacataaggtgagcaccaagtgccaatgggaaacctctagggggtatttggacccgagaagattctgtatccagggcccttgcacactcccgctcccacactgtggggcgtactttattttcaataaatccctgctttcgttgcttcattctttccttgctttgctgtgcattttgtccaattctttgtttaaatgccaagaacctggacaacttgcagtccagaccctccaccggtaacaccttctccctgcccagcaccggcgccgaggtctcttcatctcactgcagcacagagctctttccccatgagactcagcaccgcctcctgccgagagaggcagcttagtgtctgtgggaagcagaatgccagcatcccaatcccttcatgtgctaccatgacgtgtggcgggggaaggagacttggcagctgtggttaaggtgaaggtgggggacaatcctggattccccagtgagcccagcgtatgaacccttaaaagagagcgcattggccagcttctccctggaggccgagccataaggcaggaggcggaggcagagagagtcgaggtaaggacatgacctggttttgctctgaagatggaggatggagccgtgagccagagaacggagcagcctccagaagctgggagcagcctttggccaacagccagcaaggatgtgggacccaggtcctgcaactgtagggcctggattctgacaacagcttgtcagagcaggaagccagttcttcctggagcctcccagcaagaaccctgctggctgaaacctcaatttcagcctcatgagaccttgaacagaaaaaccagaagaacccgcgagaacctctgacctccagagcatgagatgaaaaatggacgttggtttacgctgctacatttgttataatttgtcccagcagcagtgggaaacacacagtatcccccttgcctgctctgctgatagaaaggtacattgttttcaaccttctgctatgaagaaagctttgcattaactctccttgctcatatgcacatggagtggaggacaaatctgctgtcaagccctgaattgggtttttgagacactgtccgtccaaacacccacagtgtgcccctgtgcagaggctatgcgtacacaaggccccaccatccacaggacgacagaggctggcttggccagcccaagaccatccggcccctcaggagctgcctgactccaggagctcgtaggccatgccccggctccccctgggcaggctgcctcctgggtctgagtggggaacaggaaggcctcagcctctcaggtcaacagaaagtttgtgctcagatgggctgaatgttccgggtccatttcctcctcaagcccagaagggtttgctttgcaggaacctgttccaagtgatttcgaagtactcaaaggctctttggtggatgtgtcaggatcccaattcctgaaataagaaagttgtgtcaaaaatcacaaaagacgctgggcgcggtggctcacatttgtaatcccagcactttgggagaccgaggtgggcagatcacttgagtttaggagttcaagaccagcctggccagtatggtgaaaccctgtctctattaaaaatacaacaattagctcggtgtggtggcaggtgtctgtaatcccagctacttgggaggctgaggcaggagaatcacttgaacccaggaggtggaggttgcagtgagccgagatcatcgcgcccctgcactccagcctgggcgacagagtgagactgcatctcaaaaataaataaaatcaaaaggaactggcctggcccaacatcctggccgctgcgtcctcctcgctgcaaagtcagattcctcgctcccgctgtggggtttcctggacccctgcccacagtctgctaagtgcctaacctggccactattggagcccccgatcccacagaggtggctgttcagagagaagcggtgggcccagtgttccccaggccacactccacaagtaggtgcaggaagaagagaggtgacacttggggctgctggggctcagcccctccagggccctcaagaggggtgtataagcctcccacccaggggtgacgagctgggtgctccccaccaacacccgctggcatcagcagcagctgatcctagggcatcacctgcccgaaagccaaggaagccccttgcagagggcagcgtatctggcagtggccactcgggtggggccgccttcctcaagctcccaacccagcaaggactcccttgcctcaggctctcccctgcctctctctcagccgcgtgagcacggctctgggcaccgcacctgcacccagcagaactgtgctaaccgggccagatctccaggggccaacacagcctggcctctaggacgggccacgctgcgagggagggaggcaagtgtggggaggccggattccacctgtttggtttttgattagggaatggcagaaacccaggcctcccggggcagggattcagctctcctaacggaggcagccttggtgggggatacttttcagcagggactcttttatcccagagtgtttttgctgtgtgcgcgatgactggctcagtttttgtaataatcgtttccatcagcatagagacagctgtttatattcttcaactttgtattatgaaaaacgtcagacagaaaagtcgagagactagtatcgcatgcacctgtgtgcacagcatccagattcaacagttacgaagggaaaattccacattttattttaaatttactaaagactgaaacacaccaagtaccgcaggaaggataacctgggtggaggagggatggggctggagagtcggggcacaagggtgaggggaatggggtgggtgggacagaggtgggggatggagggtggggtagcatggggtggagtgggggatggaaggtgggatggggctgggtgggaccgggtggggagatggagggtggggtgaggcagaggtgggggaattgatgggcgggtggaggtgggtgagggtagggtgggatgggtgagacatgggagggatggagcatggggtgaggcagaggtgaggggatgaagggcggggtgggccaggggcagcccccagtgcccacagctggagcaggcgaggggcaggagggagcggctgcctgcccctgcgctgggtgggccctggggcgccccctggcctgctgccaggtctcctgaaggaggggtttgttcccgcctcccgagcccacagtctggtctgtgtgtgcctgtgtctgttgacaactccatgagtgaactgtgatacgtcaaggcttgggggaagtgtgggaaatgcttgtgattttctttctctgtagaagtggagcagagagaaagcagctcccacagcgtgagcgcctgatacagaggagacccggggcttggaggccttaggcattcactccaaagacctgagaattaagggaacgcggcggggcctcttgcccagacctggaagaacagcaagtgctgcgagggcctctgcaccccctgaggacccctacgccccccgaggacccctgtgccctgtgagggcccctgcacccctgggcctgggtggagacccacacacaaccccactattccaggggaagagaaaggggccctgtggggcttgtcaaccatcacagacccagagactctgggcagaagcttctgcctgtcacgctcagcctgcgacggccccaccaggagagcgcagccgtgagtcccagaggaagcggcttaaaaggcccctttccaccagccgccaagcccctccaggctttgctgaggccctgaggtagccaagcaaaaaccagcctcacttcccaggagctcaatcaccagaaacttcagggaaacaaaaacccaccggaagacgttttccctaattacccagacaagtcagacaaaggccatgtagagcctttcccggagtttcccagcaagcaccgcagcatctgggttctcacgtggccgtcaagcctgtgcacctccacacggagctcgggacccacccccagggctcctggagtcagctcagcctccgccagcaggcaggccccagtgcccacaggcatttctgggcttgcagggcacagagcctgatgctttgctccagctcccagcgaataggagaggagcccacgtggctgcagcgtgggcagaggcacaagccccccaccctgctgggagcccaggtggcccaggagtgctcctagcctggtcagctgcccacgcctctggcttgcactgtctgaggccctgagagggaagcctagcctccagctgcttagccccaagaggaaggtagggctcacaggctggatggggggtcagacgcagcaaggacaagaggccacttgactgtagccagcacctgcctgtgtcccaaggctgcagtgtgtccaggagggcccaacaatacccatctgtcttgccttggccgccgccacagccagcctgaccacccagacctgagagatttgctcaccaggacactcaacacagcaggccgcagagctgcccaagagccttaaatctgctcccaccttttcattcttgatctcggtgtagacgtgctctggaagatgatccatttggggcatcgacactccttcctctcgccactgtttttcttagttactgcattattttcagatggccggtggatacttcatacctgtaagcaatgcactggagctgtgcttcttggctggtgacttctgactactcccacggagggaaagcctgggtcccctcccacccgcattcccaccctcatcttttccttatgtccccttcacgttgttaagatcttggacatttgccttcgttcaatcatacatttgagacctcctttttcgtctataggatgattctaactaggttatatggtttggctgtgtccccacccaaatctcatcttgaattgtatctcccataatcctcacgtgtcatgggagggacccagggggaggtcactgaatcacgggagcggttacccaggttgctgtccttgtgacagtgagtgagctctcacaagatctgatggttttataaggggttgtcccccttttgctgggcacttctccttcctgccaccgcgtgaagaaggacgtgtttgcttccccttctgccatgattgtaagtttcctgaggcctcttcagccctgtggaactgtgagtcacttaaacctctttcctttataaatcacccagtctcagttatatctttatcagcagtgtgagaacagactaatacaccaggccatcctgataaacagcacttaagtattatgacgatttaaatatcatcttttgagaagccaagtgctacgtttgtgtccaagggcaggaaatacaatgccattctaaacccttccgtgtaaaccagactctgcggagcactggctctctgtgccctgtttgtttccactctcagctttcaccttttctccatgtccttgcgtccccgtggcctcctccttcccagctgctgtggctcaggtgcttcaggtgcactgagcaccccaggtcttggcagacacgttgtcctcacatgagaagatgtgggctgcaattgaggttcttggttccttgtgaactttgtcttcaagcatccagcgtcattgatccaagcagctgtcactctggctctgagtcctatgggcactcagttcctctccagaagctctcaggccttccctccttccctccagattctgaaatgttgccagaaggggaagcaacaccctttgcctcaagcccgcttggtactcgggagcctggctcacatctctctgttcccttccatgttgtcctcatggagctgcagttgacacccactgggttggcccttgaaaccctagcatctccctcctaacagtcaacagaaaacgcatccaaagcccaggtgctgcagagcccaggttaggggacatgctggggcagagggacttacttcagaaggacttttcttgcctatgaaaagaattgctccttttacaaagaggacattggctgttttctgtgttgacccaaagaataatttccctttgttgcacaaaaaaaaaaaagcagagctggactttagaagctgaatgaatggggaaagtttccatctttttaaaaaataaattctgccccttgtgaacccacaggaacccgactggagagctgaaacctctgggaagccaggccagcctccgtggcatttttcaagtgtaatgtctccatcctgggtgtttttaaagtcgtgattgtcccagggttttgagggatccgcggagatgagaatagcggtgtgaaatgatgcgtgacactcaccacagacggccatgtcagagccttgtctggaacatgcaagcagaggctggcttcatggaccacagatggccgtgtcagagccttatctggaacatgcaagcagaggctggctccatgggcagaggcgctgctggcgccaggctccccgtcagcctgggcaggaagctccacggccaacatcagtgagactccagcctcttgggatcaagggcccaggccggctaggaacctgagaagccttgtccttgctgccggacgtcatcgcctctgagagctggtctcttgctctaggcagggtccctggggtgaccccccagcctgcaccccaactgtctaccaccctcagctatctgacacctctcctgaagaagatgattcctgccatgcctgcagaaaactcccagggggccacgggaaggggagcaagatggacaagactggcccttcccaggcaggagaaaggacagctgcccctcaaacccaccattcagggaaggtgaggccaggtgatgggccctggggtagcgcgggctcagcacatgcctggttccgcctggttcctccacctgatgtaggaaacacattacccagtgctcctgcgcctcagtttccccatctgcaatggaggtagcagtggctctaccgggaggttactatgatgcataagtgatgttgcgccgtgaagagctggcacagcacgggcagagagtgaccaggaacacgctcccacatcccgacagcttggtccttgttgtctgggctccggctgaacaggtcaggacgaaggtgcggccccttggctctcgaagtcaccatttgccggctggacaaaggtccttccagctcagcctgtttttttgtttgtttgtttgttttagacaaggtctcactcatgttgcctaggctggagtgcagcggtacaatcacagctcactgcagcctcgacttcccagggtcaagccatcctcccttctcagcttcctgagtagctgtgactacaagtgtgtgccaccacactcaggaaattttttttttttttttttggtagagatggagggctccctaggttgtccaggctgacatcaaactgctggactcaagcagtcttcccacctcgggcttccagagtgctgggattactgtccctggctgagcttggttcttggtgacaatggggcggtgactgagaactcaaaggaccacacaccccatggcaggcaggaaacatgaggctcctctcccccagcagattggaaaaagacaatgagaagcagctcagcccgcaccccccagcccatgtgagccaacttaaaaacagctcgagtggcaattgcgtggcctctcccactgtggtgctcgcacccaccagccctggagaagtgctgggccccgccccaaagcgtctgatgccgcagagctgtgtgttgggtgtgctgcccatgtgcacgtgtacacgagtgtgtgtgtgtatatatgtgtcatacacatgcatgtgtgtgcacctgggtgtgcatgtgtgtgtccatgtacgtgtgttgtgtacatgtgtgcacgtgtgtgtgcatgtgtcgtacctgtgttgtacatgtgttgtaccatggcaggcagtacaggtgtgtgtgtatatgtatacacacatgtgcacatgtgggaagaatacctatttctgacaagtctccgggtgaggctgagtctgccgttgcagggcccgcattctgagcaccctgggtctatcagaactcaagccctcctcctcctcctactgtcccatcccacagaggataagaggtgtgcatgtggacgggggttccaggacagcatggcttctcacagcagaaacacgcagcagaatctgtccatcaaggcaggcgtggtgaaatcagttaggcacccttacctaggaatcctctgcgcccacaaaagcagtacctggagagccaggtcctgggtctcccctgggctatcatggcctgcctctctccctccctctacagaccctaaggagcacccggcagggagagcaccgcccaccctgcccctcagtcatgcagctcacatcgggcagaggtgacgctgtggacctgggtgggccccacgtttcaagtcaaatcaagctgctgaccaggaggtaattcaggcaaaaggagcagaatcatcagataaaaggtaggatgcccagttatatttgaatttcagataattcaaatttgattcaaatttgataattaaaatgtgaatgattttatagtataagtatgtcccgaatatatacatggattatattacattatgctatgttatatcatattattttattaggaaggtggtgaccactgctaaccagaaggtgcctgtctcccagcctcatgggaacacgtggttcttggtcatgagagctgggtacagtggaagggatgtttagaaggctttggtcaaacatatatatatatatatatatatatatatatatatatatatttggggcatacttacactacaaaattattcaatgtttttctgaaattcaaatttacctgggcatcctgtatttttatgttaaatctggcaacccctgaaaagagccaaaaccccctcaggcggtcgagagtgcggcagccaagccagcacgctgcagctccctccttctcggggccgtggcctggccctgcaggggacatcgtgggaacaataattgtccaagtctagtgctgggggcatcatgggcgctgccccagagccacaaccagcccgcctttcagtcagcatggtgagtcttccgatgccccatgtgaagaattgaacttcttttctgaaagctgagagtggccccctcgtggtgggcaggttcccagggaacggaaacgccttcccttggttccctccagcagagttcagacaggagccaagatctgggtccaaacagtgggtggaaaacgccccctagaggtgtgatgtgttggctgcaagcctggtggctgggcctggggacaccctcaccaggttgccttcaatggggggttcccctgaagcccaacttttaattttctgcaaccacaggctactttggtcagaagggaaataattagatcagaaccttaatagcgttaatttcccccaaataggaagaaagcaaagggaggggacatgagagctgttaattaggtgacgacctctcctacctgctgtgttggaaaagcggctctatggaagacatagcatccagggcaggaagaggcaggctcggtggtgttgggttggaaagcccccgcctcgtccggcggccatgcagtccccagcacctctgagtccactcagcccagggaagaggacaacagagctgtgctcagtgtccagctgtctggatgaggcccagggagatggcctgtggtggagcaggaggacctggggaaacaaaacccacagtggctgcccagctgcaaaggctgcgttctttctacagtgtctggggtctcaggtatgagtggcagagggagcagtcccatcagccatgtcagcctcgttgcaatggaattccacttctgtcccagacactcagccagacaggaggaaactgtgaccacaggcatgtggacacgcaagggtatgtttgagcaaagccttctaaacatcccttccattgcacccgactctcatgaccaagaaccaggtgtccccatggggctgggagatgggcaccctctggttagcagtggtcacccccttccagagatgacatcagctccccaggcaagaaactccacttagaacccagagccgatctgaggaatgattcatgcagctagacttatacaagactgatctataagctggaaggcttgtatgttcactgaccatgggaaagcctttccagggcctgagcgtttcccacttgggatccaagtcctctgttcctgggatcaagatatttgggaagccacatccatcttttgaaggaaatttgagcaacagggatcaaagagtgaggatcattcattccatccccgtaagggagggaatgggtcagtaggttgtgtagccagtccacaaatggtcactgtccacctgctgtgtgttggccttgcctgagaggtgggggacagtggtgccacgccattcccagccctggccccctggagccagctgatagcctggcaggggaggcacacgttgaacaaattatcatccgtgattcacaatgacaagtgtgcaaagtgtatcccacaaagcacttattgagtgagaaacacaggtgtgtggccacagagaccaaatgggaccctcacagctggggcggtgaccttggagctgagagtgaaggctgcgcaggagagagacaggcaaaggggtgggggcaggcatttgcaccccagggggctgcagggtgatttgcaaggggagcccaggtgagggtccacagggactagagcaggccaagaagggaggttggtcaggggtcggctggagccaggcttctgagggttgattcccggctctgccctcaacccaggcagttccccactctactcatctctgactcctcccctcaaagcaggcgtgacagcggcacctgcctcagaaaggagggggcgtgtggggaaagcaggtatttcatgacgaccgcccagcatagagccctggagacagtacccctgcccaggttcccactggagcaggcagacagccccggctgggatgagccaagcgtgtgtctccatgtggacccggcccaatgtggggctcagcaccctcgggtctcctggtccgggctcctgtctcacgcttttatgccatcttttctcaataggcacaggggacccccaagggaggaggcgctccagactgaaggaggagagtacctggcagggacgggtggagaggcgcagggaccccaaggtgtccagggaacagtaaggagatgagtaacggtgagggtcccgtctcccgagcgtatctgtgctaaggggctgtgggctgggcttcattcctctttagagcaaggctgaggccagggccacctaggggccagggtagaagacgtaccacgtgacagcagtggcctagacccctcacgaagtctcactgggccatatctccaccagggcatggcagggaccggtatcaccagcggccccctgcacagatggggaagctgaggcccaggtcccagtcagccaagccagctcttggaccactcagcggtcccagcaggtgaggctgaccagagcctgcctgggctaagaggctgcgttcaccagtgccagctgtggttggtcaccaggatgcctgagcgcgctggcacaggcccagggcaccctgcagagcaaccaaccctcaccgagatccccagggaaggggctgttgttggcccattgtacggaggagggcactgaaccctcaagaggctcagggcctcgcccggtcacacagctggaaggcgccagagccaggaaagggacccggaagcccgacccggagcctacacccgcagaggcgaaaacatctgcgtagcggctccctggccagtgggccgtggtgggcgtggccgagagggaatggggcggagagaagcccgtgagggcagggcggaggcggaggcggaggcagaggcggagcgggcggagccggaggccgcggcggccttgattggaggccgccttaagctcgtcatggatgcgttttgacctggcggccccgcccctgacccgcccccgagccgccctcccgagcgcttccccgcccggccccagcctaggccccgccctgatctcgccccctcttcaccgtccggccccggccccgccccgcggtggggcctccgcagcgacccgcggttaacgcttccccagagcttgggctgcgcggcggccgggagtcggaggcaggcggtcaaggccggcagggccggaccccctacttgccctttctcccagcaggcgctggactctgggggcgggcgtgagcccctccgtcccgcacccagacccgggcagcgagccctatgcctgcagtaattgtggggtttctggttttgttttttccttaacatctttattgagaccgttaagttcacccgcttaaagcgcacgattcggtggggttttgttgcgagcaaccgtggccactatctaattccagagcatttcacctccttaaaatgaagctgggcccggccgggcgcggtggctcaagcctgtaatcccagcactttgagaggccgaggaggaaggatcacctgaggtcaagagttcgagaccagcctggccaacatagtgaaaccgcgtctctactaaaaatacaaaaattagccggccgtggtgagcgcctgtagtcccagctacccgggagtctgaggcagtagaatcgcttgaacccaagaggcagaggttgcagtgaggcgagatcgtgccattgcaccccagcccgggcaacagagcgagactctgcctcaaaaacaaacaaaaaagaagccggtccccatccgcagtgactcgcgtttccctccccctcccccgtccccggcaaccgtgcatctactttctattcctatggagttgccagttctggctcttcctgtgaatggattcccatgctgtgtattttcgtgtctgaattctctgactttcgtctcagcccgcacccacgctgccgcagtccgcgctcgctgcttttaggctgaacgcggctgcgccgtgcgggtgcccgcgctccgggcgcccctcgcaggttcagccccgggttgggggcggcgcttgcctcgcggctgcgggtcccagcctgaacctgtgtcttgttccactgccgcgggcgcccgccacggagctgctgcttcctagggagacggttccatcgttgaaggaacggccagactgtctttcgcagcagcggcccatctgaccgcacagcacgaccgcacgagggtcccgagccctgaccctcgcagcactcgtcaccccggccgcgtggttgtggcggtctcggcggggcagggggtccccacgcgggctgattctagtttcgcgtgaccgatggtgctcattagccatatctgtacatctttttttttttttcgagtcggagtttcgctcttgttgcccaggctggattgcaatggcgcgatctcggctcactgcctcccgggttcaagcgattctcctgcctcagcctcccgagtaactgggattacaggcgcccgccactacgcccggctactttttttgtatttttagtagagacggggttatacgatgttggccaggcttgtctcgaactcctgacctcaggtgatccgcccgcctcggccccccaaagtgctgggattacaggcgtgagccaccgcgcccggcccatctgtacatcttctttggaaaaatgtgtatccaaatccttagccgttttatagttagattgtctttttattatcgagttataagaattatttataccttctacaaggaagttcattatcagatataggatttgcaaatattttctctcatctgtgggtcgtcttttcacttttctgatggtttcctttgaagcacagacttttttgtttgggtgcagtgtatttcttactgtgctttaaagaggaacacgttttaagaacccccgcgcggggcggagcagggcggagtccccggcgggaagggacccgagacctcggctgcgcctgcgccgacgccggcgcgtgagcccgagcgcgtacccggcggagcgcgcgcccgcccccgagtgcgcctgcgcggagctcgtggccgcgcctgctcccgccgggggctccttgctcggccgggccgcggccatgggagaggccgaggtgggcggcgggggcgccgcaggcgacaagggcccgggggaggcggccaccagcccggcggaggagacagtggtgtggagccccgaggtggaggtgtgcctcttccacgccatgctgggccacaagcccgtcggtgagcgcccaggctgcggacgcgcgtgggggcggggcgggcaaccggcggggcggggcggggcctgcgctcgcgacaccctcgcccccacgctccccgccgagcccgggccgtgacaccgccgccacacccgtcccgggacccccgccccctcccacgcgcccttcggaccccgccccggaccccgcccacgacccctacccccgtgagaccgcgaggtcccagcccgcagtgccccacccccacccccgccccgggacagcccaccccctcccacacacaccacccagccctgcccccccacagcccctccacaccctggccctccccatctctccgcagccacccttgcccctccagtccccagggcagcccgtcccctccatcccctttctcctcaccgctcaccggttatcccgccgcccctcctcccctcaggtgtgaaccgacacttccacatgatttgtattcgggacaagttcagccagaacatcgggcggcaggtcccatccaaggtcatctgggaccatctgagcaccatgtacgacatgcaggcgctggtgagcccaaccgccctccctgtgccgcccgatgggggcacgaacccgcacaccgctctctgagagtcagcctgagctgggcagaggcccctccatgtctgctggggtctgctgggcagagtagaggcccctccatgcctgctggggtctgcagtgagctctcagggtcagcctgagctgggcagaggcccctccgtgcctgctggggtcccctgggcagagacccctgcagtgaggctcgtccttaaggaggacatcccggggctccagagcctgtcatggaaagcacaaacacagtgctagcagctggctagcttttcaggggctctgctttagactgggtgctgggccagagtctccagctgagaccctggggagggagggaaggatgcagagtcccgggcccttaggccattgtcagcctcctgggaggcccccgaagtgctttaggcagagggtgaccctatctgagtcacaccaaggtgaatttggtgacttctgtgggagtcagacaagtagagttccagtcctcgcagagcttggagctggcactgtgtgacgggcgagcgggttaactaggtaagcagggtggccagaagagacaggtgggtgttccaggccctgtggcagcaggaggtggtgggtccaggagctcaaagaaggtggtgtacttggagagtggggtgggggtcaggggtcaggtgaccaggaggagtggggacctgtgctggtggagagtctgtgccagccacgttggactcagggccacaccggccatcagtatgacataggtctctccctctggtctgtgcgacctcaggagggcagtgcctggcaagcactctcttcttctttgcctggttctgtgcctgtggcgctcccaaccgacaccctcggtgtccatgggctcctgccacgtggatgagaactcgaggtgcctgcggcctttccccagggctgtcactgtgccctctgcatgccgccttggggaacgcagtctcatggtgagactgcaggccgtgctgggcaggcggagcccacaggtgtgtgtcaccagggctgcccggtcctcagggcccgccttagtgatgctggccccggtgggtcttcctgactcctgcatctgctgccgctggttctgccctccctgggtctgtctggaaagcccagctgtggcaggcgctgttcacaaaaagaagaaatgccctttgcccttgccccgcccgccgcagcctccaacacagtgatgtgtgctcattggcctctccccaagtggctcttacacggctctagtgacttcttgaaactgcatcttcacccttgtttcttaaacaaaactctctatttgatatcagcatgagtctgagattcttccattcccgaatccagagaggaacttcgtccttccagaagagatcattcaggaggtccgagaaggtgaggctcgggaaaggttgggcttgggattcagaaaaggccagaccctggccaagggcagggaggtgagggtgaggaccccgggcctccagggaggtgtgagggtccagcgcagaccccgccctacctgtgcttgggtggtcttggaacctccgggattggagaggactttgtttgagagcagtggctggacggaagctgaggcctgtgtgggcagcaagcgtcggagcagtccctggcctgaccatcccccagcgtcggccaccaccgtgggttttcggtgagcgtcagctgtctcctccacaggaaaagtgatgatagaagaggagatgaaagaggagatgaaggaagacgtggacccccacaatggggctgacgatggtgagtgtggagctcaccctgccctgatgccctttggggctcagcaccccaagactgccttcaggcagggcacagtcaggtgggcgtagagcctgcggtgcagaggccccaggcaggtcatctaggcacaggatggatcctgcagtgccccctccccaggagctgagtgcctgctccatgttgtaggccagggtctgagcggcggtccctgcagtgcccgccgcaggcaggtcctcaggaggaccaggcccctctgtgggcccaaatgcaaggggctcccagctcaggaggaagctttgggttcagagggtcacgtgtcagtatgcagatttttttaactgaacaggaagacaaaaataagattctggatattctgttttcagccaagtgatttttcgtttctcagttttttcatcttcagggagtttggggaaagcatcagaaaaatccagcaaagacaaagagaagaactcctcagacttggggtgcaaagaaggcgcagacaagcggaagcgcagccgggtcaccgacaaagtcctgaccgcaaacagcaacccttccagtcccagtgctgccaagcggcgccgcacgtagaccctcagccctggtggcggcagagaagcgggcgaggcactgtggtcgctgagggggttggctgggtctgagtgccaccccccaggccacagtgataccatcccagtgccatgagcccacactgcccgccctcaggctctcaggtgaacgtggccgtcagcggggaaacgtgtgtgtcagttggaccatgtgggaccctgatggacctgaaagaccaggatcggtccagctcagatattgagggctctgaagcctagttctgtcttctctggagcagctgtggcttccccgtggctgcttggtgacatggattagcgctacgtgggctgcagcatttgggatccaggctacctagaggggcatcgggccagggaaaacctcggattagcaagcaataaaaacatgacctcactcttcctcaaaggagcccctggtcttccctgtgtgactcagttctttccatctgtttgtcccgctgcaagcctctttctgcgctgactgtgacattggaacgtggccttcctgtcaccccctccgtgccacgcactgaaggccacccccacccacctgggaaactaagaactggatattttgcctcattcacttgtactgtaacaatgtatataatttggttggtatttcactatttaatttttaagaagcctattttactagtgttttatatgaacaaagtactgcagaagttaaacctgtgttgtattttttctgagatgttttgctttaagagatactttttgctcagtttttatatgccagatacagagaatttgtagcggttatttttgtatgatctagtaacttgcaaacagaccaaatggatgagaggcggggaccgtgcagctgtcggctgatgaggaggcggccgccccagtgctgatggagatgccactttcgtgtgactgcgaacattaaagcacaaaaaaatccaacctggagttgtgtgattttgataccaaagtaagttcacttttcctccaaaaggaagtttttatttttccaagatttataactaaagcatacacttagatgacttattaacattcacttgatacaacatataaacaaaatagtaacagattctgagtggttattttgtggactgtgacaagcacttcaaatacaaaatgttaggagggcaaaacggtgcgggccctcgtaggtcaggcaggcaccagtgggctccttcctgctgaaagctgcggctgtgagatgagaccgctggctgggtcacagagtgaaatccagcgttccgtgtgcggacgaggagacaagctgtcctggccagccatcgcaccccaatgtcttcagcttgacgttgcttctctgccagtggagcctcctccaccacctgggaacatccctggccatctgtccctgaagtcctcctcaccatgacgcagatcacaaggcacccactaaaggggcaaagccaggaatcccgtgccatgtgatcgccccgtgtggcacctgccactcgtctgcaccaaacgcactgccagttctggggaagaacagcccagggaagctgctggtctacggcctgcctgagctgtattccaagggtagagcagctgcctggggggaccctgtgggtcccttttctatagagccgggacaaatccacagccctgcagtaacagcctgccacaaagagcaggcatctggagggccccacacacatagaccaaaggactgagcccgcctggcattcctccactcacagcacaaatactcagccctgcagccagggaagggtggggtctccctttgctgcccaagtgtgcccccttgcccgtctgatctctcctgttaggtcagcctcattcagggctttgtgccaggtcctgtcctggagtctcagtccgggacagcagcctggctcttaggcagtccagaagcagcagggcaaaggggggcaaatactaacacggggtgtcacgggatggccaggaggagtcctgctcgccacccaggctcactgtcctaaacctccatctgaaaccgcatctcgggtgacctcagattgtgctaggaaagcctagttaataaatctgcctcatctcgattactgtaacattttgctgcacttccaggagaaagctagagcccacaggttaagcccactgggcaggtgagcagcgtgcccccgccccgggcctcccttctggaccagaggctgactggttgaagtcaggagccacgcagcccttatggactcacaggggcttctgggcttccctgtggggaggcccagttcatgctctgctggcaggtgggatgaccaggtcaaattcacaagtgtcagggcaagggcgatgtggcctcaagtcctggtaagcgctgtacttaccctctcctggccccaggggtcctgtctgtaacctgggggctttatgtaatgcacactccaccatgtcatgtagaaggtgccgactgaaccccaatctgaaaaggaaaacagctggcatgaggctggcccgtgcacggacgctcacgcgcctgctgctgtagaggcgagacgtggtacactgtgcactcgggacaagatctgaacgggtcagaagccgccgctgatgttgagcctggaagcctcagcagcggctctacacctggaacacgcagggcccaagagcacctgctgccgcagagacattttctctatggctggcagctgcgggtggggactcagtgaaggctgagagtgggagtgatctgaactcccccgcctgcccacccagggcgacccaggggtgactgggaaaggcaattgggctccactgctccccaaatagcagcgaataaatactgagcggcagggcactggcagcgaggctccctgcttggctggttgattgaggacagggcatgcttgggccaaatcaggaggctgccactggtcttgcctggagaagatatgaaggctgtaatccaagctcccagccacacaaaattctgctgggctccttagctgtgagcattgcctgctccaggcacatcacccactgcgtgtgcagagaccattgcccttcctgggtgcctgggagctgtgtgtgtgtgtgtgtgtgtgtgtgtgtgtgtgtgtgtgtgtgtgtgagtatgtgacagagaaagagagcccctttccccagcctcaacagcaaacccttctggaatgccgtgccacacggggcgtcactggactgcagaggatgctctgaagaagcaattctgttgcacagtcccctgcagcagctcctgcacttcttggattagcacgcccccgagatgagctctgcacacacacacacacacacacaacacaaaagcaactaaagaagcaatttggtgtggtgatatttgtaaaacagaagttgggcaatgtctctaatactctttttagggaagtggttctatagtcctgccgacagtaggtagcagcgggaatgctgtccccgtagaacaatgttgtcagcacccagtatgcttgtctttctgttttctggggcagtggagggggcagcctgaccacccaagtctcagatcacccaaaccctatacaaccacccagcacccatcaatgtccccatcagagccccccgactccacctcacagtctattctgatgctgcaaccagatcccacctgtaaatcatctaacaaggaggtcaggcagctcactcaggctccctgggaaacctgccctggccactgcactaagttgatttacagaaatgtccagcgccccagaacttcggggcatcaccactgtcgtttcaagaaagtgtgatgcatgtccacaggttccagccaggtgagactgcacctgctaacagtggtcaacaggtcagcaaagattagggcccagcacccagagggtccttaacctgtacttgtggccaggattggaagacttgcgttcacggctgtccctggcacacagtacaaggaatgtcaccagttcccaggcccagcaggcctgcagggctaggagatggcagtgtcccctaggggctgggctggggccttctccacctttccaccaccatcattacagggacaactctgcgaggagctatcctcatggccaagtccaaaatccagatttagttttacctaaatgttttgaaatgaattggtatagcagttacagaagaaatttatctggagtggccactcctgatttttatttcaagaggtcaccaaccttgccatgtatctgccagcagatgtcaaaggtggatgagcaagggacccgcggtgctgggaaatggcaggtgaaagtgactttgtgttgccccatatctgccagtgcttagagagagggccctgaggaggcgctgaactggcatcagctgtgttgaacagtccccagggtgaccctcccggtggcccaggcttcgtgtggtcctctcccctaagtgccttcttacaactgagagatggcggcaaaggtgaaggaagccacggcttgcccatgtcatcctggttatataagactcggcaccctagagagaaagactcccctggtggctttgaaaagaaaacggccgtgctttgcactgcctatggagggacaggggtccgccagcagcttccaggagctgagtaaggcccccagcccgcagcagaaggacagagacccctacacacccagcttagggagagaggcccctgtggacacgtggcccctccgggggttatcctccaagggacattcttctgatggggacatcctctggggggatttctcttgggggacagaaatattcctggaagaggggattctctgcggggcaggcatcctccggggagagaatcctgctgggaggacatcgtcgggaagacatccttcctaggtacccggctcatcttccggggagaccgtcctctggggggcgggcaggctttggggacattttcgggagggaggatctcctagggcgggcatccttgcgagacggggtggggcgaatcctcccgggtgggcatcgtggggtgggggtgggcgttccgcgaggggcatcctcccgggcggacgttgggggattctcgggggagggaggggcgcggggcgggcgtcccggggagggaggggcgttgcgcgcggacgcgggcggggcctgggccgctccgtcccctccccccgcccgccccccgcgcttcctctgctttcggtttcgcttccgcctccagcgcgagccccgccgccgccgagcatggacgaccccgactgcgactccacctgggaggaggacgaggaggatgcggaggacgcggaggacgaggactgcgaggacggcgaggccgccggcgcgagggacgcggacgcaggggacgaggacgaggagtcggaggagccgcgggcggcgcggcccagctcgttccaggtgcggccccgcggcgcggaagaggcctggggtccccggcgccccccgcccggctgcgtggacgggagacccccccatcccgggcggagacacctggagcctcctggagctcccgcagccccggggacccccccccagaccggccgacccccagccccagggcccggcggggaagtgcgggggccgcgcgtgggtgacagcggagctgagcctcccgggccccatcgtgtgtgggcgccgttccccccgggggtgcctcgggcgcgtcccgcccccagccgccgtggccgcccctgatggaacccctcccgcctcgggcccgcgcctcggcctcctggcggcccctgcgcaggccccgcggcctggggctggggctggggctggggctggggctggggcccgggccgggtctggcctgggaggcttcgcgtctgcacctgcgggagcccggggcgggccgacggggcctccgcttgttacttttgttaccgccgggcgcctgtcatcgccggggttacttttgttgccgcgctgggaacgccacactgtcgcagtccggcccccctgtcggggagctgggattgatctgggagcggccttccagctgagctgcccgggttgcggagggccgggaagtgcatggaactcgacggctccgcatggattctccccttggcacccagcactgtttgcgtttgcgcctggccatggtggagcgggcagtgagagagcacggaggggctccgccctgtcgccgggagggcagcggccaggcaggctgggcaggggggtggggtctggctctgtcccacaggacggtgtgacccctgggtgggctcttgacgggctttcctcactggagttcctcaggccgctctcctgaagcggtgctcagaggccctgaccatcctgccaggcgcccgtgacccctgacctcttccctctgcctcctgctgtggcttctgtccacaagcccctccccttcccctttggacccctcaggcctccccagctgcctgcgctggaccctggcggggctgtttcactttttcctgggcagtgtcatgtatgcacctgtgggctgactgtgtggccacatccagtcaggacccagcctccagaactgacccagggaggctcccgctggccccaggaaggagaagtagaaactgatgatcaggcggggcgagagaaccacaccagcggccctgttgagaaatcaggccgagaggtcggtggcggtggctcaggcctgtaatcccagcactttcggaggcctgggcagtcggatcaccagaggtcaggagtccaagattagcctggccaacatggtgaaactgttgtctctactaaaaatacaacattagccaggcgtgatgggcacctgtaatcccagttcctccagagattgaagcaggagaatcgcttaaacctgggaggtggaggttgcagtgagtggagattgcctgggaggtggaggttgcagtgagtggagattgcctgggaggtggagattgcatgaagctccatctcgaggggaaaaaaataagaaagaaaaatcaggcagagaggcaacgccaggtcccagctggagctcagcggggagccaggggatacagtggctgaccgggcctcctaaccccccttctagcactcccccaggatcctgggtcccaattgttgccctggacaaatacgcccattcctgccctacccaccgagtgaggctcagccccaggccccccaccctcatcacaaggtcagggctgtgtcccaccatcctcatcactaggtacttccggccctttgctcagccccatgatgcttggcctgcagagatgggggctgaagggcttggggcatcaaggggacctgacatcttgctgagaagccatcactagacagggctggaggctggagactcagggcctgccctcaccgtggccagtgaggcgtggggttgggcagggaaggggcattcattcattagaccctgccagaagcacctgggtccccttctggggctacaggtggtgaggccactgcccccaagaacacagcctggtgactttagtgtacaaagcagggggagtctccaggggcacagaacagaggctaaagccagggtggaggtggccagcaggcctaggaggaggagagggtcagggccacaccccaggggaggtgcatgtcagccaggggccaccctaaggtggaagccaggagtcccaaaggggcctagagaaggagcagccccccacctggctaccgcagccctctctggttctgtgcagggtattgggatgcgttactgaggcccaaatctgccccactgggaacccccaaaaaagagccagggcaggagaatgagagggaggagccatgaaacccccgccctttaaagacagctctgtggcagctggcccaggccctgcagccctcaccacgttgggactcacttgggggtctcccatgggggtcctaatcccatctcttttcttcccagtccagaatgacagggtccagaaactggcgagccacgagggacatgtgtaggtatcggcacaactatccggtacgtacctgcccctgccccgggacacagaaccctcccgccagctgctcttctcaggcagaatgtcccaggttctactggaaggctggcctggcttgctgtgccagggccacagttctgggcaggaccctgcctggggcacagcctggtatagattcagagccctgcccttcccctctcgcgggagaccgggggcatccccctacttttctgagcttcagcacaccgtcgccttgcaaacatggccatagtgccagcctcgtgatgcacacgtgtggggtccgtgataccgcccacacagcaccccacccccatgccagccctgtctcctgcaggttgtcctcagccattaccctccacacccctgaatcacggaaacccctgtgctgccttcagggtgctgaggaggggacctgccaggcctggcctggctggcgaaatggggaaggggggtccctggggcttggaggcagctgctgtcctctgaatggcccccacctgcagagtgaggagccaggcgggctcttggggtattgggccagcctggaggtttgcagatgcgcctccccgaaagacacggagggccccagggcagcttgtgtctgatggatccctgctgtcccctttctctggctcttcaggatctggtggaacgagactgcaatggggacacgccaaacctgagtttctacagaaatgagatccgcttcctgcccaacggtaggtgcctcacaaccactggcagccggcgcttccatccttgcctggcaggggtggtccactgggccctggtttgggatgtacccggcgattaccagggccacggctttcaaatagccccacagtgccccctggaggcggccagagggactccaggatccccggcttgggatctccgcagtggtgtttgggtcggggtgggctatctctgtaaagagccagagactgaatatctgcagcttttcaggccacacagtctctatcaaaactactgaactcctgcacgacctcatgaaagccacatgtaaaccaacgagctaaggatagcttttatatttttaaatggttgcaaaaaattaaagtagaggccgggcctggtggctcacgcttgtaatcccagcactttgggaggccaaggcgggtggatcacaaagtcatgagttcgagaccagcctggccaatatggtgaaaccctgtctctactaaaaatacaaaaaaaattagccaggtgtggtagcgtgcgcctgtagtcccagctactcaggaggctgaggcaggagaatcgcttgaacttgggaggtggaggttgcagtgagccgagatctcgccactgccctccagcctgggcaacagaatgagactctgtctcaaaaaaaaaaaaaaaaaaaaaaaaaaaaagaacagtgttctattactttgatattataagaaattaaaatttcagtgtcaataaagcttcacgggcacgtgcccacacctgtttatgcacgtgccgggctgcaacgtgaaacagagactgggtggctgcacaaaacactgtcaggcccccatctcaggagactgtgcctgccacatcatgggactgggttcagctgggggctgtgtttgaggacagatttctgtggctgacgggccacgcttttgcaggaggcactgaggccccctcctgtacagacaggtcctggtcgaggaccagtggttcccccagagggaccttccgggctctcagtggggtttgccgccagccagcaacaagggtccaggtcacagatggcagcagggcaagggctgtgcatcggaggagggatgggcagccccactgagcctagcaccctgaagagcctcaggagatgagggcgaggaatagcttggggaagctgctggcagcactctctccttatgtcccccacccacaccccgtcctcctgagcacgggcagggtggctgccacagctgacttgtccccatggggctcccaggctgtttcattgaggacattcttcagaactggacggacaactatgacctccttgaggacaatcactcctacatccagtggtgagttggggaggatggggggatggggggttggcgaggccacagggggagggccctcccaggcaggagccctcccgacgctgcttcctggcacggactgagcactccctgcccttcctggaagctggtgtccacattacacggatggacattactggacatgcaagggccgctgagggaaggctcaggtctgtccccaatctgtgggctcttggtgaccagggagacaggaagggctgcacacaagctccctgaaacaggagagggggcaggcactgcctgccagaggggcagccttagtgccaggaggcctcagtgagcctcaaggggcggcccccgtctcggactcagctggggcagggtcctggcgtagtgctgggatgagacttgtggcaggcgtcttggggacccacaatgtggccccggaaacagcatgccctgctttggggacagctcgctgggcgtccacagggagcctctgctggtgtgtgacgtgtcatgagtgacaacacaagagagggaagagtgaggagtagaaaggaaggccctgtccgcccgggctggatggctgcagggcccctcgctgcctgagtcacctccccagtcctgctgagcatgcaggctgtgacttacgcaccacacacctcctgtcctgggcccttgcacgctcacctgagctctcccaccctcgctcctccacctagccactccctcctagagttgagcctgggaacccagaggggattggaactgccccgggctacacagcgagcacctgcccaaggtctggaagcggctctcctaatcccttgcctgagcatctcttctcctgcaggctgtttcctctgcgagaaccaggagtgaactggcatgccaagcccctcacgctcagggaggtcgaggtgagccaggccttggctgtgactggaggggaagatggggaggcctgggcaagccacgccgctgcagagacggggtcgcctctggcagtaggcatttggtgccccctcaggggtcccttggaaggcagaagggccgaaagagcctccagtatgatgaccttccctccccagtggtcctcaccccaccaggcatctagagaaactcaatttccgaggctgtttgtccccatgcgggagtctggggctgagcccctgagagacccggagtggcgggacctgcctttctcaccactggtttaggctggagtggggtcacccaagtgtggaagctgcccctgagggatgcagggacttagagagccgaggggcccctcctggcactttcccatggccagcgacttcctctcaggggagggcggcagcctcaggccctggtgagagctcggagcagctcagaggagagatggaggcatgagtgtgtctcttgtcactttaccctaaaagtctgagtccaggctaggtgccgtggctcacgtttgtaatcccagcactttgagaggctgaggcgggtggatcacctgaggtcaggagtttgagaccagcctggccaacgtgacaaaaccccgtttctactaaaaatagaaaaaaattagccaggtgtggtggcaggcaactgtaatcccagctactcgggaggcagaggttgcagtgacttgaggtcacaccattgcactccagcctgggcaacagagcaagactctgtctctaaataaatgtctgtctgtctgtctgtctagtccaggcctctgagtgagtcgggacccacggccacccccacactcaggaaccggggcttcagggatggtgcctgagctctccaagggggtcttttccaggtgtttaaaagctcccaggagatccaggagcggcttgtccgggcctacgagctcatgctgggcttctacgggatccggctggaggaccgaggcacgggcacggtgggccgagcacagaactaccagaagcgcttccagaacctgaactggtgaggcccggctgctcccgcccacccccaccccggcgcagaacagggccacgtcaggtttcgggcaggtcacagagcgctgctgcagacggagaactccagggctgtttgggcaatggaccaaggccctgagtcccctccttgctgcctgtagagccgggcggtccctccccgatagggttggtgagaaggtaaagaatgctcttcctgcacccaggaggtggcagtccacatagagaagcaagcaggggtgatggagaacctgcaggcggtacagccagttctcacagggtgttcgaggcgcctgtaccctgcaggggccccttgtggctctcatccagccagctcctccccaccagggggactcggggtacagccaccctctaggtgatgcgtcagcatccccctaacccccgtgtgtctagggcccacaggccattttcacagggatggcatgagtcctcccctgggcccagagaggtaaatggagagagagactgaatcgtgggccagggtggggagacctcgtggagccgggtgggagggcaggccagggcggggtgcggcccagcaggaggggccccagccattgacctctcctgacccggatctctcgcaggcgcagccacaacaacctccgcatcacacgcatcctcaagtcgctgggtgagctgggcctcgagcacttccaggcgccgctggtccgcttcttcctggaggagacgctggtgcggcgggagctgccgggggtgcggcagagtgccctggactacttcatgttcgccgtgcgctgccgacaccagcgccgccagctggtgcacttcgcctgggagcacttccggccccgctgcaagttcgtctgggggccccaagacaagctgcggaggttcaagcccagctctctgccccatccgctcgagggctccaggaaggtggaggaggaaggaagccccggggaccccgaccacgaggccagcacccagggtcggacctgtgggccagagcatagcaagggtgggggcagggtggacgaggggccccagccacggagcgtggagccccaggatgcgggacccctggagaggagccagggggatgaggcagggggccacggggaagataggccggagcccttaagccccaaagagagcaagaagaggaagctggagctgagccggcgggagcagccgcccacagagccaggccctcagagtgcctcagaggtggagaagatcgctctgaatttggaggggtgtgccctcagccagggcagcctcaggacggggacccaggaagtgggcggtcaggaccctggggaggcagtgcagccctgccgccaacccctgggagccagggtggccgacaaggtgaggaagcggaggaaggtggatgagggtgctggggacagtgctgcggtggccagtggtggtgcccagaccttggcccttgccgggtcccctgccccatcggggcaccccaaggctggacacagtgagaacggggttgaggaggacacagaaggtcgaacggggcccaaagaaggtacccctgggagcccatcggagaccccaggccccagcccagcaggacctgcaggggacgagccagccgagagcccatcggagaccccaggcccccgcccagcaggacctgcaggggacgagccagccgagagcccatcggagaccccaggcccccgcccggcaggacctgcaggggacgagccagccgagagcccatcggagaccccaggccccagcccggcaggacctacaagggatgagccagccgagagcccatcggagaccccaggcccccgcccggcaggacctgcaggggacgagccagccgagagcccatcggagaccccaggcccccgcccggcaggacctgcaggggacgagccagccgagagcccatcggagaccccaggccccagcccggcaggacctacaagggatgagccagccaaggcgggggaggcagcagagttgcaggacgcagaggtggagtcttctgccaagtctgggaagccttaaggaaaggagtgcccgtcggcgtcttggtcctcctgtccctgctgcaggggctggggcctccggagctgctgcgggctcccctcaggctctgcttcgtgacccgtgacccatgacccacagtgctggcctcctgtggggccactatagcagccaccagaagccgcgaggccctcagggaagcccaaggcctgcagaagcctcctggcctggctgtgtcttccccacccagctctcccctgcgcccctgtctttgtaaattgacccttctggagtggggggcggcgggcagggctgcttttcttagtctgataccaagcaaggccttttctgaataaattcatttgactttgagtctttggtatggaccggggtcctgttgggtggctggtagggctggtgtcacagctgatgtccctccaggctccagtggcctggcccggcgaccgcctcacattgctccaccaggtgcctgtgggggcagagtggtggcccagccctccccacacacccacttggccacacagtccccaggcatgaacaggtgggcaggctgcagcctcccagagcctctgaaggtggaaccgaggtccctcagcaggcttttgccacctgttcaagatgagtctggggcttcccttggggttggccggggcagtgcttgtgcatggtggggtctggaccaggcctttctgcctgctgtgatctgggatgcgctgctgtgcctcgggcaggcttggcagtactctctggcgggccccttggctccctcaggtctggtggagccaggtgtgcccccagggcagtccctccctgcagtctgcccttgtcaccctgggccaggaccccccgcttcccggttcccctacatttctacatcagcagggtaaggggctttttgtggggcctcagaggaggggccggacacttgtctttgctcagtgaaggacagggcagacctggggcacccctgggtgggagggttaaagctgtagaccctggtaccacttcaggtaaaatgcccagctcccatctggtggcacaggatacacgagccggaagtcactgggaggagacacccgaggttcaataatcccccagagctgcgtggggaagctgtgggacccctggtgcctcaagtgtggctcaggggattcctgccatggagggaaactgaggcagtgagctggacatagggctagaagtgcagtcactggggcagcgcccggcagatccagcgtccccagtccaggccgttgtggggctggagtcggtgaaaatcagcgcctgaagtgaggagcctgttggagcagccctgggggccgatgcctggcggtgggcacctggggacagcaggcagtgctggccagccaacccgggcttcagggagagtgatgacccacaacaggcgggcagcaggaggctctgccccactcaaaagtgagccgggggaggctgagctctgacagtgcccaccctctgcctaggatctgcctggagctgggggtggttttttgaggggcttgaaggtggttcgggggggacaccaagcaggtgtcccaggcatgaggtggctcccctggcctgaggtgaaggccagctgtgttttgtctgatttgggtcagatagcagtccttgctgactgcatgctgggcatcatggggataggcaaagtggggtgtggggccagggaccaggggagagccactgaggagggggctggccacagggtcatcttgccaggtggaactggtagggaggacttatcctgtcccccagaccctgggcttggggtggggctggtgctgggagcccctaaggccccctgctgtctgggctgacctgctccacccacctctccccgtaatcaaaagtcctctgttaggaagctctgtgccaggatgacttggactcctcaggagggtgggccttttcagctcctcccacctcgcctgatggaattcgcacacacccctcccagcccagccaccgcgctcacccagcagtgaagggagaatctccctccactcacttcaccgcgggagagattagagcgacactattattttgagacagggtctcactctcttgcccaggcaggagtgcagtggcgccgtcttggctcactgcagccccgaccttacaggctcaagcgatcctcttgcctcagcctcccgtgtagcgtggactacaggcgagcaccaccatgcccagccgatgttttaatttttggtagacatgaggcctccctctgtctccaagctggccacgcccggccgatgtttcaatttttggtagagatgaggcctccctctgtcgccaggctgactgcgcccggccagagtgcggtgctcctgctgagcagttttgcgcccactcccctctcatcccctcccgcccttgctaactcacagcattgcaacagtcatgagtccccacctgccgaaaggaagctcctgcagccccctacaacccccagggcagcctttctcgggaattttcaagattcctgggggaggggctggcatctgcgccttcactgagcctacaggcaactggaagctttgagtcccctagggcagcgactgccctggcagcctgaggcagagcttggccggacctggcgacccctgagcttctgggaaatggacatggccagcaccgccttcaggttcctgcccagggcacggttccttcaggccggggatcccggggaggggttcttcccctcggccagggtcatcgttttgcgatctctcctgggagtctgggtttggagtctggtcttagccggtagcaactgacgtggcctgaccacccggcccgtccaggtccacgggtgaggggccgcggtgggggtgctcccagcccagcaggcagcgctggacagtgaccccggagcgggaaccagggctgcgctgggcactgaccgggccctggtaccggggattcaccctccccggggtgttcctgggccttgggtcgcctgggtccgctccggcgcctggggaggggtctgcggcttcggaaactcgcgggtctcccctgcccctccctgaaggcggcccttcagcgccgcgcgcttccgcccccacactcgggttgaggagcaaggagagaaaagagcgtctttctctcttgctcaaagctgcgtgtgtgcaacgcgccagtcccaggataattttaactcgcggccggagagaacgcgccgcccgcccggcgtcttttttgttttcgcccaggcgggctgggcggcggcgcggggcgggtggaagcccccccgcccaggtgggcccggctgaatggggggcttgtgcaggcgggggcgggaaggggaaggggaaggggccgcccacctcccgccccgcccgcccgcgcgccgcccgccccgacgccgcagctcagactccgctcagccatggccgggccgcgcgcgtgcgccccgctcctgctcctgctcctgctcggggagcttctggcggccgccggggcgcaggtgagcgcgagctccgggctctgaggctggacgtggagccgcgaccgccccagccccgaacccgccactccggggtgcccggcgcagcctcgacgcccccagcccgtgtcgccgtcggggcgcggagtcgccagcgcctcgggatgagccccgtccggccgcgtcctcgatgggtcctcgctggcccgggtcggccggcgccgccgcctcctctgggagcacaagggggcctttgttcccgccgccggagggaggcgggggacacactgcgcgggggcgccgggctccgcccgaggctttgggtctcaccgaggagagcggcggtcgtcgcaggccccggagccgctcgggacccgggaggaggggacgccgggtcaggcccacgggggcacctgcgctccttaatgagttttctccgtttcagagagtgggactccccggcccccccggccccccagggccgcccgggaagcccggccaggacggcattgacgtgagtttgggggtggggagggccccgagcgctctggggttctggctctggcccccacctccctgagctccccggcctgatggagagaaaaccaggccccacctcccagagccggggtgacatcaggggacagccagtgccttcacgggatgggggtggccctgcggggactgctggtgggtaggggtggagggtgtcatgtggtggtcctccacccagaatgccggcactgaggtgtgtgtctctgggtcccctgaggggcccgtgcccctgtgttcggggttctggcctctggctgaagtggggagaggcacgtcctttgggtggttgggggccgggggtcttgttggaggctgctgggctctggagccagccatggagggggcttaggagccgactcagtcctgagatgatgtcccctatgggtatctcaggactggtgtgggccaagcagcaggaggaggcggctgaaattctacaattgtgcctccctcggagggaccgtctggggtgaacctccccatgtgaccaccaccagggcaggagtcccctcagggcctgtccacgctgtgtggtccccgtggagggctgtggagggctgcaccaagagccccccatgacccaccctctgcccccctgcccagctcggcctcaatggccacagcctccttccagtctgtccagttcacccctttgcccagtgctgccccacacatgggagggtgccctctaggtagggatcgggggctcaggggccccttttgtctgctggggctgggcctctggggctgatttggaggccagcgctgctcttttccccgaggcggggttcttgagggacccctgattttcagggttacatgtgggtgtctttcctcacagggagaagctggtcctccaggtctgcctgggcccccggtgagtgtccctggctggggagacagcctttttccagtctggagagaaagggggaactcagaacagaggggtcattgatatcctgtctcatcctgccggagcccgggttgcctgaggggaggcctcagagggcttggagcaggcctggagccagcggggcgggaggggagtgtgtgggctcagcctctgcatgttcagggcagggcctggctttgaagctttctttggaccagcgccaggcaggccgggaccggggctggtacagcccttcaggtcccccaggcctgaggtcacctggagccctcccaccttcttcagttccaggggttgagggtcctggggctcagagccctgtctgggcccactgggggtccgacagagatgcctgctggcccttagccagggaggccgaggtgaccagacgaaggtcttacagatgccactgagggatggggcgggcagccttcctgggccagcaaggtgtgggcaagcaggacacacgtgccccagctgagccgggtctgccagacagtaggggggacccaggagaggggcccatcccgtatggttgggctggggggaagtggaaagcattttgcttcattgctgaaggcctgggctccaggccagaccccgccttcacatctctgccctttcctcctgcacagggaccaaagggggccccaggaaagccggggaaaccaggagaggctgggctgccgggactgccgggtgtggatgtgagtgcgcctgcccctccccgccatgccccactccccgctccgggtccctggaggagtccggccctaattgctgttgtccagctgggcctgctcaggcgggaagcccagtcctgagagaagtctccagaagtccccaacaggggtcctttggccttcatcccagacgccaccagcatctggcaggggacagagccagcccagtggagtcggaagtcccgccagccctccttgcttgtccaggaatgagtgcccattgtcaggaccttctgcccactgctggcctcacttagtcatcttgggctccaggcctggccccagggccacggagttttgttcggaggaagccgggcctgagaagtgagctgtccagtcctgctgggttggtccccgaggcctgactacagcaggtgcctccgttgctggcttcccgctggctgccccctccctcctcccagagcctctggctacagcaggcagacagtggacagggccaagagaggaggctgccaccctaagggtcttctatgcctctctggactcaccaagggaagggtccgtgcttccatttttgcctggggggtggcatgtgcttcccatgtggcccctcgagctcgccctctgcctctccccagggtctgactggacgagatggaccccctggacccaagggtgcccctggggaacgggtaagtgcctgcgccgaacccagtggcttgggttcagaggtgaggtcccctggccacctctggctgctctgtgtccacaaggccaaggagctggtagttccaaggacagctgccctgcccgtgcctggggtggaggggcagaagggcagggtgccaagtggccagtcccctgtgcctgcctccctgcctcacctccacgtatggtcagagttgtcctggtatccagaccatggcagggagaagggggatggtttgggggaacccaccccaggtgcctcctcagaatgtccctgaagcccccagggccctgggcagaccaccaccagggacccccgggcacgcagcctgcagagtcccctgtgcctgcctgttggacactgaatcctttaccctgacggagcggcaccaccacccaagggtgcctttctccccttgtggcttctgagtacaaacccgaagccagcattctctctttggcttcataagacgtggctgtcagccaaccgggtgccactggccccaggcgcaaagcatcacagagggcaggaaggctgggctggggacacgaggacacagccctgcccttgggacccttgggagctcgtcaggcatgaggcggattctgagctgaaaacaggagggaaacagtagctgctggcagccgagtccgtggtgcccaggggtgtggggtgggctggtccccaggctttcaggaggggcctccagcctcagcacagggcccgtgcgtgccgtccagggaatgaggcatttcaggcagcaggggccagacagggcccagagggtgtggagggcagacagggcctggctgcccaaggctctggggctcgctgacgtgggcgggggctgaggactcagcaggctccgtgggtgggttatcgggagggcttcctggtggagacaggcaccccgggtcacttcggtgcctctcagccctgcctcaggttgcaccttcttgcagcgagcgctgggactctggtgccatctgtctccagcagctccccaggacggcaaagaccctccaggtcaagagggctcagaggccctgcccctctgtgaagtggggacttggaccctgttgtcctgggagttggagttgtgacgtcacacttcagagggaggggattgggtttgcaaatagaggcccagcccaacctagacgcctgctttcctcccacagggaagtctgggacccccggggccgcccgggctgggggtgagtatggagtgtggtcctctcctctccatgggagtttggggagctggagagtctggtctaaatggggtggcctccaggaatcccagggaccatccctggccctctcatctgcagcctctccggaggctggtgcctggatggggtcctggtgccctctctgggctgggaccagacacccatccctggaaccgccctttccccaggacccacctgagccatcttagggaggggtgaggcgcagcccttcttgtgcctggcaggctctgaccccatgtttggctttgcagggcaaaggcctccctggaccccccgtgagtactgacaacccttggggccctgagcaagcacgcaagtcccgagagcctgccaggctgggatgtcccaaaccgtgcctgggggtggggcttctcaggggcagccatctgaccaccccatacttggagcccctctcccttcggaggcggcacaccaaccctgggtggggatcctcggggcttccgggtgcagacctccccacctctctttacttccctccagggagaggcaggagtgagcggccccccaggtgggatcggcctccgcggccccccggtgagtggctgtcccagagcccctcagagtgtgctcacctgtggcctccacccccagactcaacagccaggggctcccttcccctctcccttttccctttctcccccaaccccaccttggtgggtgttggtagaagccctggccaatgatccagacccgacctcaggacgcagacaccagcacagtccgtgggagtgggggctggtgggagctgggcgtgtccacctccctgggagaagccgggcacctcactcaggtgggggctggtcccactctgtctaagtcataccccctccccagggaccttctggactccccggcctccctggtcccccaggacctcccggaccccctgtaagtactgggcagaggctctaagaagtgctgggcatggactaggacactgggttggaccctccccattccccctccccaggctccatgcccctccgagatctcctaaccctaacttggccactcccaggaacagtcaatggtgggggcagtggctgtggctaggccagccaacttggggatggtcaggactcaggtccccatggccatcctgccccaaggacaggtggattctgtcgttgtcacatgccctgtgggtgggccagcagctcccagcactggccacttgggggacaggatgaagggtctccaagtcccctggtggatggggaaggttgtggtccgtcagagagtgggtgggtgggttgggtggctgcaggtggctggggagggcgggagaatgtcagctgtctctttttgtcttagggacacccaggagtcctccctgaaggcgctactgaccttcaggtaggcacttgaagccatttgttaagggtgctggggggtgcctaccttggggggaggggttctggcctggagaggggcttgtccatactggcaagaaggcagggcccgagccctccctggggacaggagctcagagcagacagctcgggcacaacctggcagagaggctggctgggacctccccctcccccttcccaccctcctcaccaccgtctagacctgcactgtccctcatgaagccaccaggcgcatggagctgtacaaatgtaatgaatcacaatcatgtcacagagccatccagctcccctgcgtcatccgcagagggcgcccttggccacagatggcgacagaactggagtctgggacccacctttatcttgatctttgagccttgtcatttgcctgaaaagaaaacaggctcaggtcaggcgcagtggctcaggcctgtaatcccagcactttgggaggcccagacaggaggatcgcttaagctcaggagtttgagaccagcctgggcaacatagtgagatctttgtctctacaaaaaattgttaaagtagccagacgtggtggcgtgcctgttgtcctagctacttggatggctgtggtgggaggatcacttgagcccaggaggcagtggttgcagggtgctgtgatcaagccactgcactccagcgtgagcagccaagctcaagcctgtctcaaaaaaatgaagaggaaagaaaatgggcttcggaggccacggatccatctctcctctctgtttggccgtccgtggtggcagtcagcgccttgtttccatagagaggtttgatagttttgaagggaaaagctcggcccactctgacctgaccaccgacgctgtctaccagcctctctcctcaccccaccccggggcctaggtgcctggccagcctgtgtcccagaagggaggctttagggaaccttccagaatgtggtgcgtggttgggcccccgatcgtgggctgagtggggcaggggctgaagatacgggtctgcacccttggcctggcctgcccattgcagctgtaggatcatctagaagcagccctgggtttcctgagcatcagacctgttgcctgggctcacagtgcccctcctaaaagccccatgccgagcacattcctgtgctgaggatgggcccgacctgaggctgctgcaaggccccctgcagtgccggccgggactgtgctgaatggctgctttgatagccagtgtctgccgtggggccggctgctccatgcagcccctgctgcacttggccagtgctgaaggagaccctgtctgtgtcctgtcccagtgccatcacctgtacggagtggcctcctggggtcccgtcactgtgtggagtggcctcctggggtcccgtcactgtgtggagtggcctcctggggtcctgtcacccagagtgtcccgacacccgcgcggagtggcctcctggggccccgtcacccacgcggagtggcctcctggggtcccgtctctgtgtggagtggcctcctggggtcctgtcacccagagtgtcccgacacccgcgcggagtggcctcccggggccccgtcacccacgtggagtggcctcctggggtcccatcatctgtgcggagtggcctcctggggtcccgtcactgatgcggagtggcctcctggggtcctgtcaccatgaggagtggcctcccggggtcccgtcaccgtgcagagtggcctcctggggtcccgcgggcgctgacccctgcgtcggacgtcctgctctgtttggctgggaggggtctgactgctctgttttccgacagtgcccaagtatctgcccgccaggtcccccagggccccctggaatgccagggttcaaggtgagtcacgggtgactgggacccaagcaccaccctgtgctgggcaggaggcagctgggctcccatggggctgtggaggtggcgggtccagaaagctggaccctggttccagggttgccccaggaagaaagctaggccagcctccttgtcccgccttcagcaccccagtgacacgctgatgtggccaggctgggactggccataggcgtcagagactgcgggggagagctagcctcaagctcccaccccagcccagccctggcccgctcctgaccgcagagcgccctcatgtgggtcctagcgcctctcaggcctcagtttccccatgagggcccagacccgcggtcctgtgcgctgccgtgtggcgggccctgggctgactgaccctgcaggcctcacttcagtgttgccagggagggggtgtcggggggtctgggtggggcagtgaccccacatttgcttgcagggacccactggctacaaaggcgagcagggggaagtcggcaaggacggcgagaaggtgaagctgccgcacagcagctggggaggagctggggactggaggctgggctccggcgggagggaggggctgggctccggcgggagggaggggctgggctccggcgggagggaggggctgggctccggcgggagggaggggctgggctccggcgggagggaggggctgggctccggcggtggggagggaccgtttcatgggtgcacctgcactggcaccttctgtgcctgtcttccagacagggcctggctggtcagagctgggtgatttaggcagggtccctggacagaccccgtcctgcctggcctcgctgtggaagctccctggtttgtgtctgtggccggggcgaggggcatctgtgaggatggctggctttagcctgtagcctcccctcacctgtggtcgctgtccgtggagggtgtctgtccatggtcacctgcaggccgggggaccaggtctgggatgccctttagcgtggctggagtgatcagatgaggagaccccaggtgcacatcagaggggtccctgcttggccacgaggaggggcctggacagggctgaagggccttgtgggaacagtgaccacggaccccggcccggcagggcgaggccaccgagactcgcgggactgctctggaactgtgggcaagtgtccccttcacagagcctccaaggcccagctgtgaagggggcaacacccccagctgcttgggcttgagtagggtgactggaggcaccgaaaggtgcaaggagagccagactgggccgctgaccaccctatcccctctgtttcagggtgaccctggcccccctgggcccgccggcctcccgggcagcgtggggctgcaggtgaggctaggaaggggtaaggatggtgggatgggaactcagcccacagagtgatcaagccctgcacatatctacccccgagggggccagctccggctggggggtgtttggccaacacccaggcacaggagcgcgacctggctgggggtcccacctctgccaaggctgctgacctcaaggctggtgccccctccctctgggggacctgagctgaggctgagggctcatggaagacaccagggctcccaggggtaccccgagggccttggccctgggtgctccccggggtggaggtgcagccccagcctctgcatctgtgcctctctctcgcagggcccccggggattacgaggactgccagggccactcgggccccctggggaccgggtaagtcctgcagcccctagtgggggccggccaggtggctgggggcctggttgtctgcacctccagacttcagatgggccccgtgagtgacactctgaagcagccggcaccctggctctggccatcgccactgtggcgcaggccttgctctgggcccctgttctcgcatgtgcctgggcgagagctgacagtcggcgctcactgatgcccgcacgcggtcccaggctgctgtgagggctattcacgcgtgtgcccgggcgagggctgatgaactctgctcgctgacacccacacacacggtcccaggctgctgtgagggctgttgtggcttaggccagagcaggaggggaagcagggatttggagactactaggtggcatcttgggggaacttgctggggagccctagaggaagggctgcttgtgtctgggccgcccctgagggagcactggggggatgccagccaggcctcagacaagaggaccccggatcccctctctcctctgcagggtcccattgggttccgagggccgcctgggatcccaggagcgcctgggaaagcggtacgtgtgtcagtggacggtgggcgccatgcctcgtgacctctctcccctttccctctgctcctctcagacgcccccagccccactggggcccctcttctgtggctgagctgttccctggacaccctgggagggcttgtggcatgggtacgggggtgcttaccaatggaatccattctttgtgagacattcgcctcctttctggttctggacgtggaatgaggggtcaccatcgtccctctggcacctccagccatctctgaccactcctggagggcccaggcctggaggggcccccatcccactctctgaccactcctggagggctgtcccccgcccgggcctggaggggcccccgtcctactctccgaccaactccatggtgttaactctgtccctgccccacctcatcctttccagggtgaccgaggcgagaggggcccagaagggttccgcggccccaagggtgacctcgtaagtgagagggaagttggttccctgggtccttatgtggaagaacccaatttccctcctgactcgtgctggggagggggacacacttgggagtgagactgcaaggggctgcctgggtgggcctgggggtgcgtgggggtgagcctgaccctggagggcccgagctctctccctggccccagccgttctcccagagccacatgggagctctgtggccccctgcagagcggcccacgagccgggtggagggaccaggctccagggcttggatcctgcccccagagaaaacggctctcgggttgagcaagtgaacataaggaaagtccagaggcagccaagcgttccaggagtggaactgaagtgaccgtccccagactggtcagcctccacacctccctcgactgagccctggcagccggagtgcagggagccgccgtgccgtcctgcagcatctgtggatccaaacacagttttctccacgcacccacaggccccagggtggtggtcgggggtggcccctgccgctgcccaccatagctccttggtgtccccgagcagctggccggagaatgcgtgaggccgtctgggaagagactgccactgcttctgtcacttgtgtgtcctctagggcagacctggtcccaagggaacccccggagtggccgggccaagcggagagccggtgagtgcacgtggctgctcatggaatgctcctcccccgggtcctgggtatgtacaggtggagatggcattcagaagggctggagctcagtgccctctgctgtggccatcttgaaatctgggttaacggtggaacagccccgcagccccacacatttctctcttgcccagagcctcacgagtgtgcaggagtaggggcctcaggctgggtttacctgcacagaggacacgggaagtaagggtgggtgggtagcaccactgggcagaggtgggcactcccagggtcccgggcacccatgcgggcaccttccttcctgctgggtgcccaccctcagcccagacctgagctcccttctagcccctcgtgttgcctctgccccggagtagtgccctgtcttgggacacccagcagttggctgtgtcctgattccaaaaccagtccagggtggacgaggcaggcctggcctaaggcctcagtttccccaccgtaaaatgggccagaaccaaacttccttagggcaccatgatgtgcctggtggacgaggcctcgggcgtcagcactgcatcagcaccgcctctgccacccacccgcacccctcacctgtgcggtcaccgaggcagcactggttgccacacggccaccttggtcatgaaaccagataactgccagggtgtgggggcagacacagttttaggttgatggggaaggaggctgcccccagggcaggactgtagagggagggaggggggccactgcccgacgggccttactcatcccttgtccccagggcatgccgggcaaggacggccagaatggcgtgccaggactcgatggccagaaggttggcatggggctcagggtgtgacgggagggagggggctggaggggagttcggcctcccgaggcctcagcctccccttccgcaccccaatctctgtcctcacagggagaggctggtcgcaacggtgctccgggagagaagggccccaacgggctgccggtgagtgcccggcgggtggggccagcctggggcgccacagcttctgcctgctcagtggcccatgttgggctgggtgggttggtcactgtagggccgactccctgtgaggggttctggggcctgtgtccatcagggcctggcacaacccctggtgcccagtgggtgctgtggacggttgcctgtatgtttgcatgtgtgtgcttattcgtgtgtacatgggacatgtgtgaacatgttgatggccatccctggatgccgtgcggtcatcacccccatgggctctgagtaggggctcctgcatccaaggccagggaggctgtcaaagccgcacctcaggtccacaaggctgggagaagttggccctgcctttgggtgcactcactctggcccctgcaccctgcctgcgtgcacgcccctgggtgctgctgccggcgtgcaatgtaactggcagccctgaccgcaagctctctcctggcagggcctccctggacgagcggggtccaaaggcgagaagggagaacgggtatgtggctgcagccgctttctctctgggaggggaggcgaggggccgggaggcaaggggctggggggccagcgacctggccccagtgcaggtgtaggcaggcactcacagctctccttcctctacagggcagagctggggagctgggtgaggccggcccctctggagagccaggcgtccctgtgagtatctgcggcgccccagacccctccccatccagcctgtgtgcagaccctgccctgacaccctccttcctttccctgtagggagatgctggcatgcctggggagcgcggtgaggctggccaccggggctcagcggtgagtgcagggacatggcccggggtcgggggttagcactgagccattggcacatggccccagtttctgagcaggccggggtggcatttggttgccttgatgggccaggcccacaaaagcctaggatgccaggaggtgtggggccccatcttcttgtccctcacccgctgggagacggtcggggccaggccggagctgccctgttttcaagccttctatgctgagcccagccttgtgcccccatagactgagataatgacagcaccagccacagggccctggtggggggagccaggggcatgggtgcctggccccgagtctggcctgacaaattgggtccagggtatgcctgagttctgagaccccctaaactgccctgggaggtagccctgcctttgtccccagcaacccagccaggtggcttagaaccggctcctgtgtccacccactctgggggaaggctgagccaggctccctggggcctcttggggactcctcgaaccctgagacatccgctcacacctcacctttgtcttccagggggccctcggcccacaaggccctcccggagcccctggtgtccgaggcttccaggtgggtgaggttggggcaagggcctggcatggggggcggcacacccagacgggccagacccgacagggtatgggcactgacgagccaggacctccttccccagggccagaagggcagcatgggagaccccggccttccaggcccccagggcctccgaggtgacgtgggcgaccgggtaagtggccctctcagcaggaagctcccctgcaccccctctacccatgtaccacagtcccccacccccatgacagtcccccaacccccaccacagtcccccaacccctaccacagtcccccaacccccaccacagtccccaccccctaccacagtcccccaacccccaccacagtcccccaccccctaccacaatcccccaccccccaccacagtcccctgggacgcagacagggagaggcccttgcagctcccagtgggaaatctggccatgggcagtgtctccctgcgtggcggaggcagtggcatcagggccccgactgtggcgcctttggcccctctgaccttccacgtggtgttccttgtgggtgggaggctgcgggagcctgggccgctctgcctcctgccctgcgtagacgcctggcgggacctgcacacggtcagtgttcattcctcgagattggcgtggaggctgaggctcaagagccacgcctgctcccgcctagcgggtgtctgcggaggcgcggttgacagaggatcacgttgctataaaataggtttgaacaccatgtcccaagtgactgtaacggtcacagcttctacctcgtcaagactttttcctgctggtcttgcagcagctgcagcattagctccttgggggtccgggcagaagcggggcacggcctacccagggccccagctcactggaaggagcctgtgggtctggtctgggccccagccatgctccaccaggtccttggggacctcgtgtgcctgctgtggccacctctgctgggcagacagacccctttttagatgtcaatcccgagaagcctccaggacacggctgcagatgccccgtcattccagggtgatggtcattccagggtgatggccggggctgtggacaccaccaccccatgggggatagcgggctgtttattggcctccaggcaggacattccagaggtgggggccatgccagcaacctcagggcctccgagagatggcagggctggcacccgccctgcgggcactgcgcctgtcccaggtgtgggtggggcctggtggctgaatttccctttcactttaaactcacgggaaagtctcctgcttttctgccctttgggccagttctcacttatgtggccatgtgagcaaatggacattttttaaagggattcatagcaactcccagacatgtcctcatttcacaatgccgggggaaggtgattagatgagcttttgcatctttgactctactgtgacggaattatcctgcaattgtgcagaaacacccgcacgaattcacgggtgttacaaacagtgcaaacctaacgggacttcactacccacaaggggaggctggacagagccatcgggcccagaggctgtgaacgtgagcttggcctttgggcctgtgtctgggagccggtgttcacagaagccctttgtgcagcacagatggagatgtggggaggtgtttaccattcctgggcccagggcaggctcactttagggattcctgccattcctctaatccagagccttctctccacatccagggtccgggaggtgccgcaggccctaagggagaccaggtgagctgggcacaggctggggcaaaaggaatgaaggcaaagctgcacagcttctcccaggctcctcctgtcccggctctggccctggctgtgttttcgggacactgagcctcctttctcctcttgccgtgtctgtcagtcgccctttctggctcctgcccctcctgcttagcacagcgaaagcagctctgggcacccagcccccaggcacgccccggcatccgccgctgccttcctgggtgcaaacagctggccagagtgtccctgcatggctctgggtgcaacagaagctgcttctagtccaggaggcaccaatgggaactctcaaagggacagaggtgtgtcctgccatccttccggagaactgacagagggcaggggctaggctctgcgtgtgtgttttgcaggcagattcgaaatgcatttctgctgttcgaagcactcttctttttggaaaagtgtcagggtgggtggggccatggccgtggctgccccgccctcctgcagtgcctgctctcacttctaggcacaaggcctttccataccgctggagggcctgcagccatcgaacccccaccgcaggttctgcttggcagaaaagcctcattatgcaaacaaatgtcttccgttttttggccccgcccctgcctgcaggtctcccaagggctgtgtttggagcgggttaaaaggcagccctggggcctgggcttttggcctcgaccttaagatgaacattacacctacggaggcttgagagcagggactttaaggcatgaagtccctactcatgcatgaacagctcttttaactttggggtgtatcgttttcagggtattgcaggttccgacggtcttcctggggataaaggagaactggtgagtaattaggtaacctcactgttaccaacagctgggagcgaggtcgccactgtggctggggaacagtcctggggacagggtcaaaatctgcagctcccggtggaagatcggcagctctgctgggcagcgtggggatggagcagggtcgggcagaggccttggccactggccatcccttagcaagtgggcagggcctggcagggaaactcagcggctctggagtctgacctgacccggtgctcagacgtgtgggctcccgcactctgccccgtggagtggcacctgcatgaagcagtcacagctgcatttttgtttttttgtttttggttttttggggtttcttgttttttgttttgagacgagtctcactctgtcacccaggctggagtgcagtggcgcgatctcggctcgctgcaagctccgcctcccgggttcacgccattctcctgcctcagcctcccaagtacctgggactacaggcgcccgccaccatgcccagctaattttttgtatttttagtagagacggggtttcaccgtgttagccaggatggtctccatctcctgacctcgtgatcatcccgccttggtctctcaaagtgctgggattacaggcatgagccaccgcgcccggccgggggttttttttgagacgaagttttgctctgttgcccaggctggagcacagtggcgcgatctcggttcactgcagcctctgcctcctgggttcaagcgattttcctgcctcagcctcctgagtagccaggattataggccctcccacagtcgactaattttttgtgttttggggggttttgtttgtttttttttgagatggagtctcgctctttcgcccaggctggagtgcagtgacgccatctcggctcactgcaaccttcccagttcaagcgattctcctgcctcagcttcctgaatagctgggattacaggcgcctgccaccacgcccagctaatgtttgtatttttagtagagacaaggtttcaccatgctggccaggctggtctcgaattcccgacctcaggcaatctgcccgcctcggcctcccaaagtgctgggattacaggtacgagccaccgcccctggcctaattgttgtatttttagtagagacggggtttcaccatgtcggccaggctggtctcaaactcctgacctcaggtgatccacctgcctcagcctcccaaagtgctgggattacaggcgtgagccgccgtgtcaggcccacagctggtttttaactgaagaaaactccacttccacaggcctaaaactcaggtgaagcataaaattacgttcttgtttgagtcccttgataggcacatttctccttctggaggtaacaaatggagcagtcgtgagtccgagggaaggacggcctttctggctttcccgaggggggttttcatctatgattaagtctttcctttgcgtctgggtgaaatagaaacagcctagccccagggaccccagtctctggcagacccccacagcccagtgtaaactttttatgcctggggacaaaagacctcagttgtatgtgtttcatttagtgaattctttttttatttttttttgagacggagtcttgctctgtccccaggctggagtgcggtggtgtgatctcagctcactgcaatctctgcctcctgcgttcaagcgattctcctgcctcagcctcccgagtagctgggactacaggtgcccaccatcacacccggctaatttttgtatttagtagagatggggtttcaccatgttggccgggctggtctcaaactcctgaccttgtgatccgctcgccttggcctcccaaagtgctgggattacaggcgtgagccacctcgcccagcccatttagtgaattcttagacaacactgacaaatggaccctggaaatcccagaagctgccctacgtggccactgttgctggtggggtgaggggcagagccccttgcaggcggaaaacctaaggctttgctctcagctactcgcacggtcgggctgtgtgaggtgaccccctaccctcctggcctccgcggagcatgctgtctgggcccggtcggtccctctgctgtgcggttagactgtgtcagtctgtattctgcagctgtaacagaacaccgcagcttgggtagtttacaagggaaagagatccatgtggctcctagttctggaggctgggaagcccaagaccgaggggtgcatccatcgagggcctccccactgcgtcattccatggtggaaggcagaagggccaagaggaggtgccagagagagaaaggggcccaacccatccttttcatgaggaacccactgcggagacaacggtgttagtttactccggagagccgagctctcaaacctaatcacctcttaatagcattgcagtgcagtggccgttcaattgcagcatgtgttttggaggagacattaacccggctgactgtgtgttgacgcacctggggccagtcattcctgaggacccagctggagggggttccagggttttagggcagagaggttcagcccagcattaggcgtgttagtaagaaaaaggaatggaagcaaagtaagcgtgtgtaagagacagcaccgtgcagctaacaaagtcactcttcccaggaaagtaagtttttaaaaagcttcaatcaatcagtgcaatcacagaaatataaaaaatgtatatagaagaacggaaggaaccactgtcaatatttggatgtagtctaatagcaggtgtgtggatgatttgatttattttatcctcaactggctacttcccacccacccaacaatacacttagttcaaacacacaacttttctcttcacagggtcccagcggcctggtcggacccaaaggagaggtgagtgcccggcgactgttccgatgacaccatccatgggcgcctgctggcttcctgcccacctctgggcaaccaggcagccctgcagggcactgcccagatccgagatgtaaaaaagcttgctctggtcaaggctgggcaagacggctccgtgccggctgggaaagagcacgtcggggtggctctgggctcctgggctcgcccctgacccaccttcctctgttcctctgcagtctggcagtcgaggggagctgggccccaaaggcacccagggtcccaacggcaccagcggtgttcagggtgtccccgggccccccggtcctctgggcctgcagggcgtcccgggtgttcctggcatcacggggaagccgggagttccggtacgtcgcttttccggcttttccagctttcacagggttgagatcgtgttttttccggaaggaagttactttgcggggtgacggtgggaatgcctcaccgaggctgccgcccccatgctgacgaatgtgtggggtgaattccaggggaaggaggccagcgagcagcgcatcagggagctgtgtggggggatgatcagcggtaagtcagccacgtgcaccggctgcagcggggcccatccccgcctgggggtcccgtgcctggggctacacagaaagccttcgtgccactgctttccagccaaagtgagcccctagcactcaccccgcctgttagcccttgggggtccacgtccgccttggcgtctgcctgtcctctgcgctagaggatggcccacgctcccgccccggattcaaccagattcccagcacgcagcagacgccctaaagcctgctgaatgcaatgggtacaagaacagcggagtgtgcccctgtggctggcagggcaggtccctaaacacccccaagggcacttccttcaccttcccactcaggcttctcaggctccaaggggttgggggtcctttctagctccagcattcatcaccccaaagcagttaaaccattttccatcaatcagaaggaaaacttgcttctggaagacagcaccgtgtagatattttatgctttacgtaacaatacttctgatgatcctctctcgagtaaacgcctgcacccttgttttcccaaagaacaaattgcacagttagccgcgcacctaaggaagcctttggcacccgggtccattggtcggcccggtccagctggcccccctgggcccccaggacccccaggctccattggtcaccctggcgctcgaggaccccctggataccgcggtcccactggggagctgggagaccccgggcccagaggtgagtgtttgaccccatgacacggtcaccctgctgtaaaaatccctgagactgacttgttagtaggcgctgcttctggtgcctgccatgcgccctcaggggtaacccctggaacgtgggggcctctcatgttttggggcctagcgcagttaactccttggtaatcctgtgggaactggaacatttttaacatgtgatgtttttctcaaataccattagaacaatatttggcagggagggattgatttaaaatgtgacgaaggctgggcgcggtggctcacgcctgtaatcccaacactttggggggctgaggtgggcagatcacgaggtcgggagttcaagaccagcctgaccaacatggtgaaaccctgtctctactaaaaatacaaaaattagctgggcatggtggcacacgcctgtaatcccagctactcaggaggctgaggcaggagaatctcttgaaccctgaaggcagaggttgcagcgagctgagatcgcaccattgcactccagcttgggcgacagagcgagactccgtctccataaaagaaaaaaaaaatgtgaggaatggccgggtgcggtggctcatgcctgtaatcccagcacgttgggaggacgaggcaggtggattactggaagtcaggagttcaagaccagcctggtcaacatggtgaaaccccgcctctactaaaaatacaaaattagccaggcaaaacacagatgtaagatttgaatgacgcaattagagggatgtgaaaatgcccttaggtgaaccatgggtggaaaatcatttaaaacatgattacaaaatattaataaatactcaactgcttaataggcataaatattttgaacaaaactaaaatcccatttaaattggctgccagaggtcagggaggtggttcagccgtgcacggctcagcagcaggcataggttctgacggctgtgccactgggcggtttcactgtggaacatctgagttcacttacgcaagcccggcctcctgcacccctgggccgtgtgccagagcctggggtttatggctgcagacctgcacagcctgttactgggctgggtcttgtgggcggttctaacctggtggtgggtatctgtgttaaatacatccaaacacgggaaaggaatggtaaaaattgggtatgataatcttaagggaccactgtcacctatgcggtgcgtcgtccacctgcagccgtcctgcagtctaagactgtgtacaggtgggtccctctcgtcggaccccgtcaagccctacgcgtgtgacatctgtacttttctaaatgtttccacttcagtgaaaagctggcaccctgtttgttacaaaggttgatcagacaccgctgtggtgtggctgcaacagatactctaaccatatgtctgtgtccacacctcgtgacaggaaaccagggtgacagaggagacaaaggcgcggcaggagcagggctggacgggcctgaaggagaccaggggccccaaggtacgagtccacggccagcaaggcttcactgggtgacatctcttccgccatcttgtagctttatgtggggcgtgcttgggttatgaatgggtctcttttcctcttctcttggcaaagcagtcttagagacaagattaggaattgtctcaataaccactttaatacataaaagtttaatcggggctgggcgcggtggcttacacctgtaatcccagcactttgggaggctgaggcagacggataacctgaggtcagcagtttgagaccagcctggccaacacagtgaaaccccatctgtattaaaaatacaaaaatgagccgggcgtggtggcgggcgcctgtaatcccagatacttgggaggctgagacaagagaatcgcttgaacccgggaggcggaggttgcaggttgcagtgagccaagatggcgccactgccttccagcctggcgacagagcgagactccatctcaaaaaaaaaaaagtttaatcagtaagcagatcctcctggatctattttagctaagtcaatttggttagattctgtttaagctactcagtatctatttcagttaaagtataacagaattttctcttaattgacctgtgcatacgttgaatatttccatttctaatgtcaaaaataaatgctttgtcacggagggaggcagcgccaggatccttggcaaaggccatcccctgcccgcccctgtcttagcctggtgccttctcaaaaccaggaggccttagactccaaggatgtgtgtgtccagatgagaaggatcccgaacagtcttcgagaaggcacccgctcccacctctgcctgggtgccctggagccttctcctctcctctcctccacgcactcacactgctctctggatgccctggagccctctcctctcctccacccaccccacctctccctgggtgccctggagccctctcctctcctccacccaccccacctctccctgggtgccctggagccctctcctctcctccacccaccccacctctccctgggtgccctggagccctgtcctcccctccatgcacgcacgctgctctctgggtgccctggagccctctccccttctcccctccacgcacacacactgctctctgggtgccccatgctcctggactctcctttgctgacctagctctgcctctacctggtgtccaaacgcacaggggtcccaggccccagccacgtctctccgcctgtggctctgaacagcatctgtgttgcacttgctggtggacagcagcctcccggccgcaccatgcccgcaccatgcccacaccatgcccgcaccattctggactttgtcacctcatctcagtgaagggctctgacaccccccacttaggcggctgactccctcttccctcacacccaggcctcccatgtttccactgtcatcactcaccaaagccaccccacaaccccccactccgggccccctgctcactccaaatccactccttactcacacagcccccaccaaacccgcgtaagtcagagtgcgggtgtcctcaggacggctctgcacccctgcctggggctggccgcgcctggccttccccggacactcccgaccgccagccccgcggagagcctttgtgtgccgttccctcggcctccccacccgctgtggcctctccccaagtgaagagtgagcagatggaagagcagggcttgcccacagctggatgtcaagtccccctgctttcagtccgggctgcagctgaactcacctttctgctctgtcccaaggaccccaaggcgtgcccggcaccagcaaggacggccaggacggtgctcccggcgagcctgggcctcccggagatcctgggcttccaggtgccattggggcccaggggacaccggggatctgcgacacctcagcctgccaaggagccgtgttaggaggggtcggggagaaatcaggctctcgaagctcataaaattcaacgtgaggaagcaagtgacaaggacgcccgaagcacagtggacggtcatgaaggagcgggggtgtggcaggcgggtgacgtccaggagagggagcgcccctggctgcccctcggccgccgactggacgcgcgggccttgccagcgagcaccctcatcgggctgtcgcctgacagcatacctcaaaaggccctagctaataaacctgtaagcccagcatttgagagaaggtagggtgtgtatatataaaaggttgtgtacaactccacgaggtgaaaaatattcagtaacttgtttacatagcatttgtgtaaagactatgatctcatcccaataaaatgatatattaaaccttcagattaatgactggctacagagtaacaaaaaataaagaatttaatgtacagtaaattctctcccatacaaaggtctagtctgatgttttgtgtacaaactcacatctccaattaacagtatttattgagggtgactttgtattgcactaacgtctattgctattacctgttgtgattgataagtaaagccactcattgaaaaacccaattccaaacaccacagtttgtgacacatgaagtaatgaatgactcttggtatgaaaacgtggcatttaagcgtctactgtgacagtatttcatttgtggacaaaagtagctttaaagcaagtatctggaaaatttttagcacacaggtttaaaatggtcctgcacgttgcaatacagcagcacgtgactcagagtcatgacaagggggtgtgatataacgaatgaaataaaatttccaaactgtttttagttaacaatttaacttgttccaattgctaaaggggcatatttaaaaggtaaataagtaaaaagccgtgtactttttaagattaaagaaagtacaaaggatgtcaattttttaagttatcatgttaagaaaacatgatggaatcagagcattgagaaaatgcttactaattattactaattaattattactaattattaagatggcttcatccccaaatggtctaagaggacattcatggataagcatttgcgtctagataaatatttttacaaaatgtgctctcaaagtccctactggagtcccgtcagcttgagtcacgcccttttcgagtcagactagccgagcagagctccagggttgcagaaggcgtgcacaggtcacgaaggaatggctgttcaccccccgaggattcctgttcagtccgatcacttgatctccatcgaggggctgctctgtaaactcccctgtgcaggacaggtcaccaaggagtccggtctggtcagctttagccttcggccagttttaccgcaaaatacgctctcaaattcctgcagtgaagaagtgacggttaacatactgaattaactgacatgaaaactgctgtcttccaaagtgcaaaaggttcaaattaagagctaagtaaatgactttagaatacgctgttttaaggtgtcattcacaaacttgtgtcttacctcacaaggggatttatataataaacagattttaactttttttttttcaaatagcagttacactgtacatgtacttttgtttttccaatactcagaatgtctggccacactgtattgattttattgtggtaaaatatacatgacatgaacgtttcaaccgctaatgggccctagctaataaacctgtaaacccagcgtgtgagagaaggtagagtgtatatattaaaacgtttcaggccgggcgtggcggctcacgcctataatcccagcactttgggaggccgaggtgggtggatcacctgacgtcaggagttcaggaccagcctgattaacatggtgaaaccccatctctactaaaaatacaaaaattagctgggcgtggtggcaagcatcttgtgaccccagctacttgggaggctgaggcaggacaatctcttgagcctgggaggtggaggttgcagtgagccgagatcatgccattgcactccagtctgggcaacaagagtgaaactccgtctcaaaaaaataaatttttaaaaagtttcaacaattaacaagtcaggggcatctacccccaccccagggcgactgccttgccctctgcactgccacacactcagggttccaaggccagcaaggtggaggtgctgctcgctgagatggctctgtccttggggagaccctgccagcagggtgggggtgggctgagcttgctcctgtcacaccacctgtcttttacaaaaggcctcaattataatggtggggtcagtctcaacctcccgaaggagactgagaggaagagaggggcacaggcgacggcccgatgacaggcgccaaccaccacgggcagaatgtggaaacgtctacgggacaaatcattcccttttcaacaaatgaacggtgaggaagaaaggaagggggaactattacgggttaagatatatttaaaaactatcaaccaaatgtgatgtttggatcctgattcaaatgagctgaccgtagagacacctgtgggctcacgggagattctgctcagattcgggaaggagactcaggtgggtaataaggagtgaaggctttcaggaaggagactgataatgcggttgtgtttttaaacaggccttttctttcggaagatatatttatgaatgaaatgatgtctggaattgttttaaaataattcagcgggggtgggagggcgaggggataggtgaaacaagctgatgcctgaaactgagttagagggacctgggagttcactttctatttctgtgcagatttgaaaatttccataagttggttttaaaacatagcattctacacgattaaatccaggtttatacagtttttattgtggtattaaaatatagcataaaatttgccttttaagcatgtgtaagtgtacagtggagcagcgtgaagtccactcacagtgctgtgcagccgccaccaccttttcatcaccctaaacagaaactccgtacccattaaacactaactccacaccgctccggcccccagcccctggcacgtaccagtccactttctgtctctctgaatctgacggctctaggtgccttgtttacggaatcccgcagggtgtgccctgttgtgactggcttatttcactcagcataatgacctcgggccatccatgctgtagcctgtgtcagaatttcattccttttcatggctgagtaagattctgttgtgtgcttgtaacacatttgtttactcattcctctgctggagcacacttgagtcatttccaccttttggccactgtgaaaggtgctgccatgaatattcatagaaaagcatccatttgggtccctgtttcacctctttggggtttatgcttctctggtgattctatgttgaaccttctgaggagctgtcatactgtcttccacagtggctgcaccatttcacacccccagcggcaaagcacagggattctgatgtctccacatccttgccaacacttgctattttgcttttgtttttgtttttgaatagccatcctagtatgtgtaaaagtagtatctcattgggtcttgattcgtatttccctaatgactaacggcttggcgcatctttcatgggcttattggccatctgtgtatcttctctggagaaatgtctattcaagttctttgcccatttttcagttgtgctgtcttttttttggacagggtcttgctctctcaggctggaatgcagtggcacatccacggctcactgcaggctcagcctcccgagtagctgggactacaggtgcacaccatcacgcctggctttcaacattttttttctgtttttttttgtttgttttttgtttttttttttttgagaccgagtctcactctgtcacccaggctggagtgcaacagcgtgatctcagctcactgcaacctccacctccctgcaacctctgcctcctggggttcaagcaattttcctgcctcagcctcctgaatagctgggattacaggcacctgccaccacacccggctaatttttgtttttttagtagagacagggtttcaccatgttggccaggctggtctcaaactcctgacctcaggtgatccacccacctcggcctcccagagtgctgggattacaggcgggagccacggttcccagtctgtgtagtctttttgttgctgagttgtagtaactttctacttaattcaagtccaggaggacacaagcgccatgctgccatggatttaacttctgaaccacctggagtgactggaacattccacccatccacttttaagcaactttccaaccaagcaagctgccatttccaactactgtgtgcactcagaatctacacctgcatataaatatactcattttcttcccaattttttttttttttggatatggagtttcactcttgtcgcccagactggggtgcaatggcacgatctcagctcactgcaacctttgcctcctgggttcaactgattctcccacctcagcctcctgagtagctgggattacaggcatgtaccaccacgcccggctaatttttgtatttttagtagagacgggggtcacaccgtattggccaggctggtctcgaactcctgacctcaggtaatctgcccacctcagcttcccaaagtgctgggattacaggcgtgagctacgacgcccagcttcttcccaaattttaaaaggttttaggatgcaatttaaaatgaccccacattttgataatttcctatattctgacacctaaagcctacatataaaaaacacttgcctatttggcaagatagaattcacctttcaggacaattaaatgaaagtcagagcctgggccggctccggagaagttagaccctcggagctggtctcggactgctggggcgtcaccccttcagcaacccccgctgaccatggcagtatttcatgacgaggtggaaatcgaggacttccaatatgacgaggactcggagacatatttctgtccctgcccatgcggagataacttctccatcaccaaggaagagctggagaatggggaaggtgtggcaatgtgtccaggctgctctctcattataaaagtgatttatgacaaagatcagtttgcgtgtggagaaacagtgccagtgccttcagtcaacaaagaatgagttaaatgctaaggaagccttcaggaatccgaaccctgaacagctggaaatgagcccagatagaaacttcaaatgcaaagctcctggcttcgtggagacacagccatttgtgatttgctgttctgtaggcgtgttgtggattctttccatcaactgctgatttcatcttcaggaagcaagtccataacatgacgtatctggagtttgtgcttagaaccttaaattggaagcattcttaattatccatctaaatttaaaagacgataatttaaaaaaaaagaaggaaggaagaaaataatcatcctcagacataactaggcgctcgcaagatcttctgaactattttcacacagtgatgaggctagtcccggcgtctgccttcactatgaacagttgggcagaggcagggttgagttgtggttccatctggacccttgcagggcccgcccacgacccgtctcctgggagctggggcagctgtgaaagagaggagcagatccccttagtcctcctcagctgagcccaggccaaagacgtggtactgatgtcatcgcactctcaatctgcacctcaatccaaatgcatctatttgcaacagaacatatgtgaaatcgttgagttttaaaggaatttttataacatcaaaacattgagatgacaacgtcccaaagcagatactcatgttagatttgtgaacatgagaagaataacaacaagacgggtgcggtggtgaggggcgcctacggtcctagctactcgggaggctgaggcaggaggagcacctgagcccaagaggacgaggctgcactaagctgtggttgcaccgcactccagcctgggtgacagaatgagggcccctcgctgggaaaaaaaaaaaaagagagaaagaaaaagaaaaataataataccaacaataaaaaaaattttcttagtaagaaaaaagaaatagctctaactatgagtcaggaaaatataccaggaagttattaagaggaagaaagcggccgggtgcagtggctcacacctgtaatcgcagcactttgggaggccgaggtgggtggatcacctgaggtcgggagttcacgaccagcctcaccaacatggagaaaccccatctctaataaaaatacaaaatttgccggggtggtggcacatgcctgtaatcccagctactcaggaggctgaggcaggagaattgcttgaacccaggaggcagacgctgtagtgagccaagatcgcgccattacacggcagcctgggcaacgagtgaaacttcatctcaaaaaaaaaaaaaaaaaattacaagctatttaaaactgagaaacaatgaaagcattgtgtcctaacctgtgaaatgtttcaaaagcacaccaggacaaatttactataatgcattgattagaaaacaacatagacaaaataaactttcaacccaagataccagaaaaaaataaaacttcaagaaggaaataatagaaataaggttttgggataataaagataagagcaaattatgatggaaaaagcactaccactgaccccacataaaaaaccaacaaagtgaatgactgagccccagaaagactccagcacggcccaggccagaggggtacagcagaccaaggagctcaggtggccagaggtaaggaggcataaactcattaggacaaaaagaatggcttttctttttcaagatgctttatttttaaaacaggtcacaacacagcgttcggctcattctgccacgaacaagctacaaacgcttgctctgcagccgagaggccctccagtggccatgttcaaaaacagaatgaaaatccgtatgtaggccaggcgcggtggctcacgttggtaatcccagcactgtgggaggccgaggcgggcggatcacctgaggtcaggagttcgagaccagcctggccaatatggcaaaactccatctctactaaaaatacaaaaattagctgggcgtggtggcgtgaccaaacggcatgggaggccatgatcacaggctgctgggaatggatccaagagaggatgaagtggctcaggaggtacagacaagcgccgggcagccgggcagccaaggagagcagagaaatgggcggttgccagtacaggacacgaggtccagggagttctcacagaaggatcacgggagaagtcacagcgtgtccgcaggaaaggaggagagaagggacaggccagtccgagtctgcagcagggcctgacaacagacagcacgtgagggacagcgacaccggggcctgatgcagatggcagggagatgcgaagcgggactcaaccacctgctggtgtgaagaagggagggacagacaccacaagggaggccccaggagtggctggcaccttcagggcccccagcgtgcaggggcatctcacaactaaacacaaccagcgccccagacgccatcccgactggggaaaaagttgtagtgggcactattgagacagcaggcaaaatgtgaataacagtcttgcaccaatgttaaatgtcctgattttcatcgttgtggatattaaaaagtcaacacgggggccgggcacagtggctcaagcctgtaatgccagcactttcagaggccgaggcgggaggatcacctgaggtaagatcgagaccagcctggccaacatggcgaaacactgtctctactaaaaatacaaaaattagccgggcgtggtgggatgcgtttgtaatcccagctactcgggaggctgaggcaggagaatcgcttgaatccaggaggcggaggttgcagtcagccgggatcacgccattgcactccagactgggtgacaagagcgagactccgtctcaaaaaaagtaaacactgggccgggtgtggtggctcaggcctgtaatcccagcactttgggaggctgagacaggcggatcacaaggtcaggagttcaaaatcagcctggccaacatggtgaaaccctgtctctattaaatacaaaaattagctgggtgtggtggctcaatggtaatcccagcactttgggaggctgaggtaggcaggatcacttgaggtcaagagtttgagaccagcctggccaacatggtgaaacctggtctctactaaaaatacaaaaattagccgggcatggtgggccatgcctgtagtcctagctactcaagaggctgaggcagaattgcctgaacctgggaggcagaggttgcagtgagctaagatgacaccactacacttcagcctgggcaacagagcgagacgccgtctcaaaaaaaaaacacggaagtatttaagtataaagaagcatggtgtctgcagcttactatcaaatggatcccaaagatacctggagagaaactgggaccggcagggagaatggagcaaacccggacaggcctacaaagagctctttgtactgttcttgcaatttttctgtaagtttgaaattacaccaaaatttaaaattaccaacagtaaatagagccatctaaacccagaatgtggggcattctctagacaaccggcctgatctcttcaaagcctcaatgccatagttaataactgtgggggggattcttgtagctcaaagagcttgaaaactgtcatcaaatgcagtgcataatccatggctgggtgctggactgtggaaaaaaacagctatgaaagtcatttttagaacattttggctgggtgtggtggttcatgcctgtaatcccagcactttgggaggccagcctgggcaacatagcaagaccctattgctacaaaaattaaaaaactagtcaggcatggtggctcatgcttgtaatcccagcactttggaaggctgaggcaggaggatcacttgagcccagaagtatgagaccagcctgtgaaacatggcaaaaccccatccctacaaaaataaaattagctggtcatgatggcacacacctgaagtcctagctacttaggaggctgaggcaagaggattgcttgagcccaggaggcagaggctgcagtgagccataatcatgttactgcactccagcctgggagacagcaagaccctgtctcaaaaaaataaaacaaaacaaaataaacattaaaataaaaaaattaggcaggtatagtggcaataaaagaacattttgggcaaatctgaatagtctgtgcattagaggatatgaaaaagacttattatcttggggaggcatgatcatggcactgggattctgtggaaggcctgtcttggagatttatgtagaaatatttagagatgaaggttcgtgtctataattgtctttgaaattgtgcgtgtgtacaaagtaaatacggtaaatgttcattgctgagactgaagcatgggtgtacaggtgttcactgtaattcctatgttcactagaaaacgaacagaagtgaatcactgatggctgacgccgccctgccctcaccccatacttatctatcccctgcctcccgatgtccccacctgacgcccccagaatgccgagatcctgcttctctgagtcttccctctcagtaaacagccccatccacccagccaccgaggccaaaccctgacgcctttttcccatcacaacccccaactggtaccgccacaaacacaagaagccttgtgcctttcctcctccccagcgccgccccctggcagccatcgcccggcaagccacatcttccagctactgcagactcctggtttccactctcaccccagcccagctcctactccctagcatccagtgtcccccagcagcagggtgatatgggtcatgtcactcactgcccaaagactgccgaggcccccaaccctcaggactagcggtccaccaggccccagcctgccccggtgccctgcccagcaacactggctggcaggcaggcactcctcagactctgcagccggcaggtcctggctgccagctccctgtcatcattgggccttggttgggcgcctccctcgaccacccaacatcacccaatccaaagcagcccccgagtccggctggctcgcagcagcaccttccacccgcaaggccctgctcccactgtcttcacgtttactcgtcccctgcctccctccatgccagacatgcctctatcttgcgcagggtaccccagcaccttcagcagtgcctggtcacactggaaaagacctgctgagtgaaatgtgtaccaaaataatgtagagaaatcacttaaaactctcatgtattacgtcttcaaggacaaaaatatgcatccaagtaaaagggggcagtcactaaagaaacaattaagaacccatgtgtttcggctttttatgttctaattccccgaaaaaattgtgaactgacttgacctcagcctgtttcttggtgggtctaataatgtgacccagaagtaatcagattcaatgtaattacatttaagaaatattcagcaaacataatgtatgtaaagtatcatatccataaacatttggtctacttaatctttgactatacatacaattaacattttttaatttcaaaaattataaatgccttcgtcttgagtaaatcagatcaataatgatttactaatagatacacaaagccaaaacattaaagcattttttaaaacacaaaagctttattttatcaaaacaaatcaacagtctacctctaacaataatcttcaagagtaactgcattgtaaataaccataaacgatccgatcagaatacattcaacatagcatcgctatagaatgcaattaaatgtataatgtaaataaacaacttaaattatgcaactcgcaagatgtaaatgtcatgtggacacagaaaagggacagagacaagacaaactattgcctggcgctgaagagacgagccctcactcaacacagcccagctgcggggacctctctctagccccaccatgacgtagacacaggagcccttcttttgagatggagtctcgctctgtcacccaggctgcagtgcagtggtgctatcttggctcattgcaacctccgcctcccgggttcaacaattctcctgcttcaacctcctgagtagctgggactacaggcgccaccacgcctggctaatttttgtatttttaatagagacgggggtctcatcatgttggccaagctggtctcgaactcctggcctcaaatgatccacccgcctcggcctcccaagtgctgggatcacaggcatgagtcactgcgccaggcctgggagcccttcttggaagaggtccttgtttgttgcagcaaccttagtttgttctctagtcagactcctgcctgggtcaacagcagcaattccccaacagcttggaccaggtacaaagtcaggaccctgtggatctatttcactaaggtctgctcactcctagagggccaaagagccactgaccctggccactgcaacgctgaggccgggacctggaactcgggtcccccaaaggcagggcccaggaccctggaactcgggtcccctgaaggcagggcccagaaccctggaactggggtccccccaaggcagggcccagaaccagccctgtgactgacaccttcttccttttaggccactgaggggctgactgaactcctgcattcaaatcacacgtctagttccagccaaccacgatggcttgctgcaggccactgccacgaccacacagacaggatcacggcaggctggctgtcctgagggactgcatatgctggcgctaacacgccggctcctccctagtcacccagtccacagaagtatattcacccggtccacagaagtatattcacccggtccacagaagtacagtcacccggtccacagaagtatattcacctggttgacagaagcatagtcacctggtccgcagaagtatattcacccattccacagaagcacggtcacccggtccgcagaagtatattcaccgagtccacaaaggtatagtcaaccagtccacaaaagtatgttcacccagtccatggaagtatagtcacccagtctgcagaagtacattcacccagtcagcagaagtatattcacccagtccgcagaagtatagtcacctagtccgcagaagcatggtcacccggtcggctgaagtacattcacccagtccgcagaagtatagtcacccggtccacagaagcatagtcacccggtccacagaagtacagtcacccggtccgcagaagcacagtcaccggtccacagaagcatagtcacccggtccacagaagtacagtcacccggtccacagtatagtcacccagtccacaaaagtatagtcacccagtccacagaagtatagtcacccagtccacagaagtatatgcacccagtccacagaagtatatgcacccagtccacagaagtatatttcttattaacctgctgggcatatttgaagtccagatcagactatttgacacttatctgcatttttgtttctctttcttttttggggtgggtgggggtggggcagggtcttgccctgttgcccaggctggagtgcagtggtatgatctcagctcactgcagcctcgacctccctggctcaattgatcctccctcccagcccccgccccgagcagctgggactacaggcatacgccaccacaccaggttaatttttgtattttttagtagagatggggtcttgccatgttgcccaggctggtctcaaactcctgggctcaagagatcctcccacttcagcctcccaaagtgctgggattacagacgtgaaccactgtggctggccggtttttgtttttctattcttgcttttatccctttcacaagtttttctgagggcaaatatcatgtcctacacacccgtcagccccagtgcaatataccgtacacagcaggtgcccaatttgctatctgacaattgcctcttcacagttatttacacactgagtgtaacacatgtaggctgtgactattactttaataaatgacaagttatatcattaaagagcagagctttgctcatactggacttagtatttgatgttagattccaggaaacaaaggatagtttgagttatccttaggaaaaaggagggacattgttaagtaaaatttgtaaaattctgaaaatctacctggcctaccactaacctttttaagagaatctccatgtctttcctggatgtatttcaggaatgctgtggtccactgcagagttgtggccttgtcagtctcggcattgcagaacggcactaagagattcaactcatcacagcaaatgcggattctgcgcctatagtcaaaacccaaagtcatcaccgagagagaccggagcaaaacaaacatgtaaaaggaagcgtctcctgtagtacttgagggaaccagagctcgtgcatcctggccactgagtgccacggaagcgcctgtcaccacaggaagccccacggctttgccacggccttgtctacagaggcagccactgccttccagaggccagagcatcctcgggtgcccttggcggccccatgacccacaagctccctggagctttccctctttacttctcacgggccaggttcaagtctctagattagggatggctccaaagcccctgaaactggaagcaacattttgtgtctgacaccttcttccatttggaccactgaggggtccaaattgggcagataactctgtcattcaagactgatattacttgcccttcacgggctaaataccctaccaggaactcgtgcacagctttctccaaggggccctgattcagaaaggatcacggcccaacactctgttaatattctgaaacttggtctttgtagagataaacaattggagtcttgttattagactattttttaaacttttacatattacattcagtaacatgcaaagtcctaaacaagcagatactgagcaacttattcaatatggcccttgttactcaccttcacacccgtctatttagaactttaattagagactttgccagtaaaacagcagctggcatttactaggtgcttttggacttctagacattgagcgaaacactctttacacatcagctcactgaactctaaccacaagtctacgcagtagagctagaagtccaactttcaaactgtcaacgtacggtgtaaggctttccacatagcaggtactcaataaatgtctattaaataaatgtcggagcaaaatgcccttcataattcacagtagggtgaggaaggccctcagttagtccatgtgtataaaagtatcataaaaagatattagctagctttttaattttctttctttgggggatgggtctcactttgtggcccaggctggagtgcagtggcatgatcacagctgactacagcgctgacctcccaggctcaagtgatcctcccacacctcagcctcccaagtagctggggcgacaggtgtgcaacaccaccactactagtattgttggtttttctttagagacggggacttgctatgttgcccaggctggtttcaaactcctgggctcaagcaatcctcccacctcggcccacagtcatgagccactgcaccctgccccagcaagtttgaatagatccctttaaaagaaattgccatgccaggcgcagtggctcaagcctgtaatcccagtactttgggaggccgaggcacgtggatcacctgaggtgaggagttcgagaccagcctgaccaacatggagaaacccctcctgtactaaaaatacaaaattagctgggcgtggtgacgcatgcctgtaatcccagctactcaggaggctgaggcaggagaatcgcttgaacctgggaggcgaaggttgcgttgaaccgagatcgtgccattgcactccagcctgggcaacaagagtaaatctccatctcaccaaataaaaaaataaataaataaataaattgccttagctcaacattcaaccttggagcttcaaacctgagtatttgtctcactcactgttatttatttcctgaacttaaagcagaaactggtacacagtaccagtactcgatacattatgtagttaattaattatagattagggaaatattctatgaaaacccaattataggccgggtgtggtggctcatgcctgtaatcccagcactttaggaggccgaggcaggcggatcacaaggtcaggagttcgagaccaacctggccaatatggtgaaacctcatctctactaaaaggtacaagaattagctgggcgtagtggcgggtacctgtaatcccagctactggggaggctgaggcagaagactcgcttgaacctgggaggcggaggttgcagtgagccgagatcatgccactgcactattccagcctgggtgacaaagcaagactccgtctcaaaaaaaaaaaaaaaaaagaaaaagaaaagaaaacccaattataatagaaaaaaattaaccactcttaattctacaaagaaggataccacaaataaaatctacagacaaaaccacttaaataacaattttaacctcttccttcccagcaatcttaaaagaaccaggcaatagccaggagcggtggctcacacctgtaatcccagcactttgggaggccgaggcgggcagatcacgaggtcaggagatcaagaccatcctggctaacatgctgaaaccccgtctctactaaaaaatacaaaaaaattagccaggtgtggtggcaggcgcctgtagtcccagctactcaggaggctgaggcaggagaacggcatgaacccgggaggcggagcttccagtgagcagagatcgcgccactgcactccagcctgggcgacagagcaagactccgtctcaaaaaaaaaaaaaaaaaaaaagaaccaggcaaaacttgctgaactcaagctggctggtaagcagcagttaccaaaacagcctgaccactctcctcagaaaggcctgcagtcagggctggcccttagtggagtctgcaaacctagattcagggagttaagagtgcccccagaacctacactgtgcaaacgatatggctgacactgaacaactgctttccttctgggagactggactgtggttgcatgcatgggggcagtgcctacgtgacacgcccctggtctctagcgagctttcctggttggcaacacctcacccacgttttcagaccacatggctgggggcatgaggggcaacctgcctgactccacagggcgcgctcttagaagcttgcacctcagctcctgccttctccccacgcgcctttgctgatcgcacctggcatcctttctccatagtaagtcacagcctgagagtgactgcatgcggagtcccgggagtcctcctagtgagccagcgagcctgggcatagtctgggggatccttgatccatctgggaaagctaacgatgctcctacctgctttattccctctgaacgcagaaacggctaaggatcactcatctgtgataaccatgtatgactaaggtaatcatatatgagtcagcctgacaagcagtcacacgtattaccttctatctctttccattcggttatgcctctccctacgttgagaccttcctccctggggcccactctgggcctgctcccccaggtttgcctgtgaggactccgaggactgccaagcgccttgtgtggcggtggcaccttcgcccacattctgaatctctccaagggctcttcgctctacatttgtgtccaactgacgcattctactccgattcctcttcagtgcttgtttgcatagcgctgcttctttgcgaaagaagaaaaaagtggtttttaattttgtattcttatctcaattaatgctgaatacagttttggccttttcaatccaagatataaacattattgggtaagcagcacagagaaccgaaacacaaagagatgtactaatgcagtttttcagcatcagcagggaccatgaagcccaagcctattttatacaacgaaactgaacaagaatcaatcatcacactaaatacgttttccaagtgctatgcaaccaatatgacctcatccaaagcccctctttttaattaacaggtgttatctatgaatacagaaaacaagaagttgtttactttttctaaaggtcagaatggaaaaaaaaaaacaacaacaacaaaccacctggacatatttcctcccaaaaatattttctttatatacaattattctaagaacaagaaaaaaaaacaattattctaatatgacagtatttttactgcaatgctcagaacaaaactgcagcagcgtgtgtgtgtgccctcgccgcagaagtggctctcctccccaaagcaggaagaagtagcgtccgagcttttctgctgcgtgacaggctatgccacgtgtgcgtcagtggaactgtatccatcaaaggaccacaggcacgtgactggcaggcgtgctcatgtgcacgcgtatgccacacaaagcacccatttcagaaggatgatgaagctttcagcaggagagagaggaattcggtcgttttggtgatattttattccttaacctgagtagtcggcacagaggctgctttaatactcatctttgtatcttacaaatgtgaacatatactttggcataaaattttatagggaggaaaaggaaggactgacatgggagaaggcggtagctcttcctccccatcttgtcttcaccaactcttggaaagctaagtgtaaggagtgttcttttttcgggtcacttcacaaatcagtttcccagggaggaaggggctacgcaggtgtttcccagggaggaaggggctatgcaggtgtttcccagggaggaaggggctacgcaggtgtttcccagggaggaaggggctacgcaggtgtttcccagggaggaaggggctacgcaggtgtttcccagggaggaaggggctacgcaggtgtttcccagggaggaaggggctacgcaggtgtttcccagggaggaaggggctacgcaggtgtttcccagggaggaagggactatgcaggttagcgcagcagtgccttcagcagtgactttatttccaaactttccgaatcaccttacagcctctccctggcagccctaatagggtcctcctattagcagccacctatccaaaggctttcggcagatgttagatgactgcctcactcatcgagtataacataaggaaaataaaaaactataaagtactttcagtaacttgaaaataactgaaaatttatgtaagtctatcactttactgttaagaaaaagccctcaaacgcaacgttctcacaccaagattaattatgtttgagaatcagaataatgtttaaagcgaaaagacagggaagcgggtggacagacccctgagatacacagacacctccaagactgtttcacatgtgtacaaaccatctgtctcccctgccccccaaggccaaaatgccatcagccacagggctcagtcagaagaaagctcccactacctgctgcttcatcgcttacctcccactttaatccaaacttgctcaggcaaaactttgtttctactacctaacgtctgtttagtggattcaatttcttgctgataacagaaagaaaatgctctaggcaatccaatatcctggtgcttggcagcttcaagtacagaacatgagttactagaactctggaaaaaaatgaagcaacaggaattttatcaatatgtggcttactctcctctttactgcacaaatgaaatgcacttaacaaacatcaaaactactaacacgtaatttgaagaactttagttgcactgaagatttaaaaatattcgcataccacataaacactcaactttcacaggtatttttttgtttttgtttttttgtttttttttttgagacaggctctcactctgtcgcccagactggagtgcagggtcgcgatgtcagcccaccacaacctccacctcccaggctcaagcgattctcccgcctcagcctcctgagcagctgggattacaggtgtccgccactaccacctggttaattttcgtacggggtttcaccatgttggccaggctagtcttgaactcctgaactcaaatgacccacccacctcggcctcccaaagtgctgggattacaggtgtcggccttggcgcccggcttaaaaggttattaagctcactgaagggaaaaaaaagtacttgggacctaaccaaaataagttaaaatttacccatttaatacaaaagagcaaagcttcacaaatcatgttccctacctgtgtctgtgaaagattagaatttccactagtagagcaagcatttgtagtaaacagtgggtatgtaaattgcaaagcagtagttgtagccgcagttttatttttcactaatgctgtacatttgttttgttgctgaagaggaacattcattagttcagatggatgtcgaatgagagttaccaaactgccaagacaaaagaaagcccagaagtgtcagcaatacgtggcagacaagcatccaccatcccactcccatggctctggctagtttttccagacagcaacccaactctcatcctggaaatctctacacaacaattagcaactatcgctgctgtggaagtcctcctcttcctatggaggaaaagcaaaactgcgccacctccctgctctcatcacatcctgacaccaatctcacttttgccatcctccagtgtgaccacgatgggcaactacaggctgggatgagcagaaaactgcggacgcagccccttccacagccatccctgagggtcgccaagggggcggctgcaggctggagcctcattttagagctcaaagcctgcaaacccccgtcgggccttcctaggcttccctgacatccaagagtgccacccggagcacatggttcccaggaattctgcgcgctcggccccactccaggcggggccactgagggagggggtgtttagtttctggaagtacctgctccccggggcccgcacagcgcacacagcctttcggggcggccccagacccggtgaggtccgcgccctgtgccgccgggagggcaggctgggggcgtgcacagcgagggccccctttgcctccgccccggccccggccccggcctcggcctccacccgggccccgccagcccccggccgccgggcacgcacttgttgagcgccccgcccggctcggggggctcggggccgcgcggcgcgggcggcggctcggcggggatgctgttgaagcggtcctccaggcggacgcgcacggccggcttggcccgggcctcgggcgcgccgtcgggtccagccgcagccgcagccgcgcccgcgccctccttggcggcgccgtcggcccgggccctcgctccgtccccgccgcccgacgtcttctccgccgcgcccgcctcgcttagcagcatcatgcgcagctcctggaagtcgatgtggcccaggcagggcgcgtcggccgccagcgcggacgggcacagcacggggtacacgggcgccgcgcccccctgaccgcccgccgcgaagccgcccgcgcctgcgcccgggcccgccgccgccagcagcgccgagttgaggcgcgtctcgagctcgccgtcagccgccgcctccatgtgcgagcagaggatgtgctgcagctgcgtgtactccacctccgtcatctccaccaggctcaggtcggtggtcgtgaagctcagccccggctcgcccagcgccgcgtccccgccgcccgcgccctcgacggccgcctcgccgcctgccgcgcctgcctccggcggcggctcccgcggtccggggcccgacatggcggcgcggcgcggcccaacggcggcgagggcgacgcgggcggcgggcggcgggaggcgggaggcgggaggcgggaggcgacccccggcccgagcactactctgcgccggccacagccggcgcgccgttgggggagggaaaaccgctgagtgccgcgcacagcgcctgcgccgccccgccccgcaacggcaaccccacccctgcgccagccccgccccctccgttacccgccgccgccggccccgcccccgcccaaccgcccgcacgcccggccccgccccacgtcggcggatgcttgcgcggagggcccgcccccacggcccagccacgcccccacagctaggccacgcccccagctcaggccacgcccggttcccagccacgcccctgctgcccggccactccccgctgaggcccggcgagggcggctgcgctggaatcagcgtgatacctacgcggtgacaccctggggagaagccacgtccgtgcgtgcacgtgcgccccattacagcggcaggaatgaagacgttgtcaaaacagctccctggacccacagtccacagtgcccaggccatccgcttcatccgcgtaaaatgcgcagcgcatggccgggttctgtggctcatgcctgtaatcccagtactttgggaggccgaggcaggtggatcaggaggtcaggagatcgagaccagcctggccaacatggtgaaaccccgtctctactaaaaatacaaaaattagctggacgtggtagtgcgtgcctgtaatcccagctactcgggaggctgaggcaggagaatcgcttgaacccgggaggcggaggttgcagtgagtcgagatcttgccactgcactccagcctgggcaacagagccagacttcatctcaaaaaaaaaaaaaaaatgcacagcgcgacggtggtggtacattcccagcgctgggcccgcctccaccgctgcattcaccaccggtctcctgtagcagtcagcacactgcccctcccccgcctgcagccactaatcttctgtgtccaggagtttgcctaggctgggccttccctgttaagggaactatgcaatatgtggtctttaagagacttatttttgcaatcttgaaataattcctgtacttaacctctcacccacattcccatctcactcagtggttgtctgttctctgtctaggcattaggacacttaaaggcctgtgacttgcacatcgtcttctaagccgggtctgaatctttcgctcatttcatcacagtttagacacagaccaatatattacaatgattcaacgatgggctatgaaagctcagccatgcaaatctaaactcacacatgtatacatgaaaataatatatcagttttgggcaaaacatcaggtttcagaaaacactaccaaggaggaaagcaaggacttaaaactctcaaggacatggcaacagaagtcgtctaacgtaaaacagagagggaaggctaagagagtgagcagagcatcagtgagctgtggggccgcttcaagcagtgtgatttgaagtcccctgggggtggaaggatggggagaaagacattttaagaagtaatgattgccaggtgaggtggctcacgcctgtaatcccagcactttgggaggccgaggcgggcagatcccttgaggtcaggagttcgagatcagcttggccaacatgatgaaatctcgtgtctactaaaaatataaaaaattagccaggtgtggtggcatgtgcctgtaatcccagctactcaggaagctgaggcagaagaatcgctggaacccgggaggtggaggtttcagtgagtagagattgcaccactgcactccagcctgggagacagagcaagacgctgtctcaaaaaacaaaaacaaaacaacaaaaaaaaataatgattgaaaagtttttttaaaactacaaacctacagacccaagaagtttaacatacctcaaactcaagaaacatgaaggaaactacaccaagatggaaagcaaattgctttatttatttatttttttattttttgagatggagtcttgctctgtctcccaggctggagtgcaatggcacgatcttgactcagcacaacctctgcctcctggattcaagtgattctcctgcctcagcctcctgaatagctgggattataggcatgtgccaccatgcctggccaattttttgtatttttagtagagacgggattttgccatgttggtcaggctggtcttgaactcctgacttcaggtgatctgcccaccttggtctcccgaatgctgggattacaggcataagccaccgtgcctggcctcaaattgctttaaatcagtgaaaaatcttaaaagcagctgtacacacacacacacacacacacaagacattgtgtacagaggaacaaagataagaatgattacaggccaggcgcggtggctcacgcctgtaatcccagcactttgggaggctgaggcgggcggatcacaaggtcaggagatcgagtccatcctggtaaacatggtgaaatcccatctctactaaaaataaaaaaaaatagctgggtgtggtggcacaggcctgtaatcccaggtaactcaggaggctgaggcacgagaaccgcttgaacctgggaggtggaggttgcagtgagccaagatcacgccactgccctccagcctagtgacagagcgagagactccttctaaaaaaataaatgaaaagattgcagtgattgcagacatttcttcaggaataatgcaagtcagaacagagtggaatcacacctttgaagtgctgagggcaagggagaagctgactgatagtgtcaggcgtctgtattcacaggctctgcgtctgtggattcaaccaaggatcaaaaatactcagaaaaaaattacttgcaccgaaatgcacagactgctcttccttgtcattattccttaaacaatatggtataacaagtattcatttagcatgtacatcgcatgaggtattataagtaatctcgatatgtatatattttagaaacagggtctcgctctgtctcccaggctggagtaggataatacggttatagctcactgcagcctcgacctcctgagctcaaccaatcctcctgcatgactctgccgagtagctgggaccacaggcacacaccaccatgccctgctaatttttattttattttattttttgtagagatggtatcttactatgttgcccaggctggtcttgaactcctggcctcaagtgatcctcccacctcagcctaccaaattacagagattacaggtgtgagtcatcacgctcgccgctacagatgatttaaagtgtatggaagaatgtgcataggttatatggaaacactatgacattttgcataagggacttgaacattcgtggattttggtacccatggcaggtactggaaccaatcccccagggatactgaggaataactgtagttctatgcccagcaaagatatttttcaaaaacaaaggcaaaataaagacttttttgcacttacaaaagctaaaataatccatcactagcagacttgcagtacaagacatgttccagaagtccttcagacaaaaggaaggtgagactggatagaagtcggggtctccacagaagaatgaagagactggacgggttaaagctatttattacgagccttaccacaaccactgcaatacagcaacaaagggtgatggctaataaatcaataaaggagagaaaatggaatcagactctcaaaggggcagaaagtgagatatgattgtgccactgcacaccagcctgaatgacagacctcacctctaaagtaaataaataaatgatacaaaaattaaaaatgcaagaggcagaaaaaagaaaaatagaacaaagagcacacgggacaaatagagaataaatagcaagatagtagatttaaatccaataaaaaaaaatcacatgagatgtaaaaggtttaaacacgtcaatgagaaagcagagaccagaatggataaaaagtcagaacttggaggccgggcgcggtggctcacgcctgtaatcccagcactctgggaggccgaggcgggcggatcacaaggtcaggagatcaagaccatcctggctaacacggtgaaaccccgtctctactgaaaaatacaaaaaattagccaggcgtgggggcgggcacctgtagtcccaggtactcgggaggctgaggcaggagaatggcgcgaacctgggaggcggaccttgcagtgagctgaggtcccagctctgcactccagcctgggcgacagagtgagactctgtaagtcagaccttggagtgcccgtaagaaactcattttaaagagaaaggatggaaagtgcgcacctccctagcgctgtcgaaaggcagctggaataggcatataaacactaaagtcaatttccaggaggcgggtctgaagaaaaagaagaaaacaaatactaaagtagatttcagagccaagaattttgccagcgattctggtcatttcatagtgaaatagggggcagaacattttcctgattaaatgcatctaattagaaagcttaaaaatacatggagcagggccgggtgcagtggctcacacctgtgatcccagcactttgggaggccgaggcgagcggatcacttgatgtcaggagttcgagaccagcctggctaacatggcaaaaccccatctttactaaaaatacaaaaattggctgggcatggtggtgtgcgcctgtaatcccagctacttggcaggctgaggcaggagaatcacttgaacttgggaggcagaggttgcagtgaactgatattgtgccactgaactccagcctgggcaacagagcgaaaccctgtctcaaaaaaataataaataaaaaataacaaaacaaaacaaaacaaaccatggagcaggccgggcgcagtggctcacacctataatcccagcactttgggaggccaaggcgggcagatcacaaggtcaggagttggagaccagtctggccaacatagtgaaaccccatctctactaaaaatacaaaaaaattagccgggcgtggtggcgtgaacctgtaatccagcgactcgggaggctgaagcaggggaattgcttgaaccagagaaatggaggttgcagtgagctgagattgtgccactgcactccagcctgggcgacagaggaagactccatctcacaaaaaaaaaaaaaattctgggcacggtggctcacgcctgtaatcccagcactttgggaggctgaggcaggtggatcacctgaggtcaggagtccgagatcagcctgaccaacacggagaaaccccgtctctacctaaaaaaaaaaaaaaaaaaaaaaaaaattagctgggcatggtggcgcatgcctgtaatcctagctactcgggagcctgaggcaagagaatctcttgaacccgggaggcagaggttacagtgagcagagattgtgccattgcactccagcctgggtgacagagtgagactccgtctcaaaagaaagagagagaggagaaagacagaaaatcagaaaggatgcagaagacctggacaatgccatcaaccaacttgctctagttgatgtttatagaacaccccaaccacccacatcagaatacagtcttttcaactggataggtaacatctaccaagataaaccataatttggaccataaaatatgtctcaataaatttaaactttagaaaaatatgtcctcaaccacgactgaatttaatttcaaatctaatgtaaagatatttgagatattgtaaatctccgaacatttggcaactaaataatacatttctaaatgtctcacgggtcaaagaaatcaaaagggaagttataaagtatttagaaatgagcaaaaatgaaaacgacaacatcaaaattcatggaatatagctaaagaaatacttagaaaagtatagcaatcacaaaagaagacaagtatcaaattattaatctcaacttctgcactgttgaaaaggaagagtagaaaaggaagagtaaagtaagcagaactgtgcgtcagtttccattgtatttctaaatacaataaaaaacagaaaaaccgtagagaaaagctcaaatgaaaccaaaggctggccgggcgcggtggttcatgcctgtaatcccagcactttgggaggccgaggagggtggatctcctgatgtcaggagttcgagaccagcttggccaacatggtgaaaaaccccgtctctactaaaaatacaaaaattggccgggcgtggtggtgggcacctgtaatcccagctactcgggaggctgaggcaggagagttgcttgaacctgggaggcagaggttgcagtgagtggagattgcaccattgcactccagcctgggtgacagaacgagactccgtctcaaaagagaaaaaagaaaaaaaactgaaggccggttctctgagagaagcaataagatgtatcaacctctggccagactgagcaggaaaaaagagaaaaacaaatgaccagaatcaggaataggcggtgacagcagtaaagattctaaagatactggatgggtgcagtggctcatgcctatactcccaacactttgggaggccagggtgcacaggccgcttaagcttagaagtttataaccagcctgggcaacatggcaaaaccccatctccacgaaaaacaccaacaattagccgggagtggtggcacatgtctgtgattccagctacttgggaggctggaggtgggaggatcacttgagcctgggaggcagaggctgcagtgagctgtgatcatgccactgcactccagcctgggtgacagtgagaccctgtctcaaaaataaaatgaagaaaaaaagcttctgtagatattgaacgtatattaaggggctattatgaacaactttatggcaataaaatcaacaacttagacaaaatgggcaaattcctcaaaatacataaattacaaaagctcactcaagaataaatagataactttattttctctatatctgttgataaaattgaactggtaattaaggaccttctcataaagaaaatgcctctaacagatgtcttcacgagctaatcctactaaacatttaaggaagaaataataccagttctattggtaatacgaactcttccaagaaactgaacaggaggggatactttctaaagcattctatgaaacaaacataactctgatatcaaaaccagacaaaacagaactacagagcaatatctgacaggagcaaagatgcaaaagttatttttatttttatttattactttaaaaaaaagtttcaagagacagggtcttgctctgtcacccagactagagtgcagtggtgtgaccatggctcactgctgcctcaatctcatgggctcaagcgatcttcccacctcggcctcctcagtagctgggaccacaggcatgccagaatacctggcaatttaaaaaaatttttttgtagagacaagagccttgctatgttgcccaggctggtctcgaattcctgagctcaagcaatccttccacctcagcctcccaaagtgttgggattacagttgtgagccaccatgcccagcccaaaattctttttttttttttttttttttgagacagagtctcactttgtcactgagactgaagtgcagtggcacgatctcggctcactgcaacctctgcctcccgggttcaagcaattctcctgcctcagcctcccaagtagctgggaatacaggcacccgtcaccacacctggctaatttttgtatttttagtagagacaggtttcaccatattggccagggtggtcttgaactcctgaccttgtgatccacctgcctcggcctcccaaagtgctaggattacaggcatgagccaccccacccagcccaaaattatttttaaataatgttagccctgtaatcccagcgctttgggaggctgagatggacggatcattggatgccaggagttcgagaccagcctggccaacgtggcgaaatcctgtctctacaaaaaaatacaaaaattagctgggcgtggtggcgggcacctgtaatcccagctactcaggaggctgaggcaggagaattgcttgaatccgggaggcagaggttgcagtgagccgagatcgtgccactgcacttcagtctcagtgacaaagtgagacactgtctcaaaaaaaaaaaaaaaaaaaaaacaaaacttagaaataaatttgatgaaagatgtaaaagactgtacactgaaaactacaaaatactgttgaaataaattaaaaagatggacaaatatagagatatactatgttcatggattggaaggttcgatagtgttaagatgtctgttattcccaaaactgatgtatgcagttccaataaaaacccagcagtgtcttagtccatttgtgctgtcataacaagacaccttagactgggtcacttataaacaacaaaaatgtattgctcctagttctggaagctggaaagtcccagatcaaggcaccagcatatgtgatggctgatgagggcctgttccgctcagatgctgccttcctgccacatcctcatgtggcagagagagaaaatcagctcccccaggcctcttgtaaaagggcactaatcccattcatgatggctctcccgtcatgacctagtcacctcctaaaggcccctcttcttattttttatttatttatttttttgagatggagtctcgatttattgcccaggctggggtgcaatggcatgatctcggttcactgcaacgtctgcctcccgggttcaagcaattcttctgcctcagcctcctgagtagctgggattacaggcacgtgccaccacgcctggctaatagttttgtattttcagtagagacagggtttcaccatgttggtcaggctggtcttgaactcctgacctcaggtgacccgcccgcctcggcctcccaaagtgctgggattacaggcgtgagccaccgcacccggccattgttttaaagacccctcttcttaatgccaccacagtgcagattaggtttcagtatgaatcttggagggatacaaactcagaccgcagcaagcagggttttttttctttctttctctctcaaattcttggaaggttgagcagggcagggtcaccaggcctgccggcaactgctccccttcctctcatcctcctgtagcttcttggactcctgggccaattgatttttctgttccgtgatgtggagtgatcaaagctggttctgggttttctggagctggatctttgattgcctttgatttaaaagcattggtaaccgtttctcacgggaaagaggcgctgataattcatgcaaatgagcatcaatgggcaaaattcaaccaagtgcctctggaaccaaggctgccattgaacattctagtaaaaatggggtggaggcttttgcccaagtgctctggataatctgggaaaagaaaatggtgagtcagtgctttattttatttatttatttatttatttatttgtttgtttttgaggcggagtcttgctctgtcacccaggctggagtgcagtggtgcgatctcggctcactgccacctctgcctcctgggttcaaacgattctcctacctcagccacccaagcagctgggattacaggcacatgccacgatgcctggctattttttgtatttttctggtagagacagggtttcaccatgttggccaggctggtctcgagctcctgacctcaagtgatctgcctgcctcggcctcccaaagtgctgggattacaggtgtgaatcaccgtgcccagccgaattttttttttctttttttttctttttagatggagtctctgtcacccaggctggagtacggtggcacgatgttggttcactgcaacgtccgcctcctgggttcaagcgattcttctgcctcagcctcccgagtagctgggattacaggcacgtgccaccatgcccagctaatttttttagtagagacggggtttggggtttcaccatgtgagccaggatggtctcgatctcctgacctcatgatccccccgcctcggcctcccaaaatgctgggattacaggcatgagccaccgtgcacggcctttttttttttttttttttaaatagaggcaaggttcaccatgttgcccagccttgtctccaacaagctcaagggattcacctcctcacagacagtgctcccacaggcgtgagccaccacgccccaccttatttatttttatgtatcttaacttccaaggtggatttatttaaaggttttacaataactatgtccaggctttaggctcatgggaagtaaatgaggacacctttttcccaagaagaatttctttaaaaccaagcacattgctaaataacaacattatatttggcaaacaataattggcaacaaaataagtttattattctgcccaagccagtcccagatgctgtttcttaaccaagatacaaacaaattttgctgtagcaagtctagaccaattttatcaaacatgtctttggttagatgtctagtttcatttaacgttttgaaaactcatttgacagccagtcaagtccctcatctacaccagctccgtgttgcacaagtggcttgaacataccatgtcctgttaggaagagactgaagagctggctggctcatctgtcgtcacactgatggcccgagcgctgggcaaaccctgtttgtttgcagagagcagtggcgctgcgtctccacactcaccggccagaagccttttctgcagcgcgtccgccacttcccgaattctttcatgatcgttgctatctaccagcaaaagaaaaccctgggtattctggaagtaatgcttccagagaagcctaattacatcttgaccatgaacatcccacaccatgaaacaagtgttctctttttgagtcagagtctcgctctgtcatccaggctggagtgcaatggcgcaatctcagctcactacaacttccacctcccgggttcaagcaattctcctgcctcggcctcccgagtagctgggattacaggagcccaccactatgcctggctaatttttgtatatttagtagagacagggttccaccatattggccaggctggtcttgaactcctgaccttgtgatctgcctgcctcggcctcccaaagtgctgggattataggcatgagctaccgtgcctggcccaaaacaagtgttcttatattctactctttccatgttaaaaccaatggcaggaactgtggtgagtacctcccctaacttcagtttatacacaatgtataggcagcatccaatcgaaccgtccaaatgtgcatctgcttcttgctgaagaggcgggagaagagagaggagatggcggggaccatgggttcgtggcacttgtgatgggcagaagcagaggggcttggggggccctgtgctttcttctttcatgcttccaggcaaattgaacaagggggaagagaaagaactgaggaagaaagagggaggcagggacatctcactggcccatgtgctggtgaagctgtagacaggaattagcaggacgaggacctgctggtgatggacacagcagctccagctctcgatgctttaaatgcctggcttggagtctgaaaaaggaacctgaaagcctctatgactgccttaaagtaagtccttatctcctgtagccatggggctgagatttctgcaaagcaaacctgaagcctagtctcctggatgatttaattacagcctaaactgcagtttcgactttgcagtgcctcttttgttaaagttagggaagttgggaaagaatgggaacctgacgttgcaatgggggcatgtgggcggcaagccacccaggtgccgaggcaagagaccgagggcacgagctgttccagtgtaataaaatatataaaacaacaagagttataccagatacagatcatagacatgattatatatgaatatctttcatcattagtttgtagcaattactctttataatgcttgctctataatcataatctaggaaaaaccaggccatacagagacaggagctgaggggacatggtgagaagtgaccagaagacaagagtgtgaaccttctgttacgcccggacagggccaccagagggctccttggtctagcggtgacgccagcgtctgggaagacgcccgttgccagacggaccgtggtctagcggtagcctcagtgtcacggaaaaacacccgctacttagcagacggggaaagggagtctccctttccccgggggagtttagagaagactctactcctccacctcttgcggagggcctgacatcagtcaggcccgcccgcagttatccggaggcctaaccgtctccctgtgatgctgtgcttcagtggtcacgctcctagtccgccttcatgttccatcctgtgcacctggctctgccttctagatagcagcagcaaattagtgaaagtactgaaagtctctgataagcagaaataatggcgtaagcggtctctgtctctccctctctgtctctgccttggctgccaggcaggggagggccccctgtccagtggacacgtgacccacgtgaccttacctatcactggagatgactcacactccttaccctgccccttttgctttgtatccaataaataacaatgcagccagacattcggagccactaccggtctctgcgcattggtggtagtggttccccgggcccagctgtcttttcttttatctctttgtcttgtgtctttatttttacactctctcgtcaccacacacagggagaagcccaccgaccctgtggggctggtccctacaggggcatgtgggaagatcccagtgaagctgaggaccacgagccctgcaagtccattgggatctgccggtgaactccgcaggtcgtctttgaaggcacatgtggctcttctgccactgcctggggagctgagacccctttgcccaaagaccctcaagtgccttccctagggagctgccctgtaaggtgccgccgtcctgcccgggactcaccaccacctctgtgttccttctagacctagatccagactggagttccagcaggccccaaaagagaaagtgtgaggtgtggcctacaaatatgtttccctacgaaaacctgcggaaaatgtgtggaaatcgatgttgagagtgcgggatctgggtgggaggaatataagcttgcgtaagtggacagggactcagatacgagattctggatttgatgcgttggagggaacggctgggagtgacccaccccccacccccattttcttcatcagtcaccgaaactttcgccccacaggtagctgaccctaaattcagtgaaatccagaactttcctggcacactggagaggacggcagaacgctgggatggatttatcgtgcaagaccagcttgatgtccttagggcttggaggtcaccccttcacgaggattgtgaggagtgaattcatcggggagccccgcaccctcacctgcaccctcacccccacccccacccccacccccacccccacccgcacccccacccccaccctcccccccacccgcacccgcacccccaccctcacccgcacccccaccctcacccccaccctcacccccaccctcacccccacccccaccctcacccgcacccccactcgcacccgcacccccaccctcacccgcacccccaccctcacccccaccctcacccccaccctcacccccacccccaccctcacccgcaccctcactcgcaccgcaccctcactggcaccctcacccacaccgcacccacacccacatcggggaagagctccatgatcattcttttctgtaggcgaaaaactgcggcgggaactgctgccatgcagctgggctcccaatgcagtggggatggtggcgctctgggctggcgggagctatcctgccggacgtgattcccagcacagccgtgagcggcagcagaggcgcagtcatctgacccacatagttcctgcgttgcctgatgggcgcagcttccctagaactgaaaaaaaaggacatcctgccaaaggcgtccccgttctgtgctggcagaaaggctgtaggtccgagagcaggagtcctgcgctctgactggaagccccaacacagagtccggggccctcggccaagttccagactctggacagacccaggcccctggaatgaaggacagactgagtctccgagaggaaggggccctgctaaatgccaaaaacatgcagctaatcttcccaccgccccttcccaaaggaatcttcctctgtttatcaggagtctgtgcaacgggaatgggaaataatcaggccttttaggaattactagaccctggagctgaaaggacattcatttcaggaggcccagatgccaggcagagctgtggtttatggaggcggacgacggagttggttcaggttttcctctgaggaggcccagtgagcctcccggcctcctgtggaacagacatactcagccaatggcagggtccccacatggtcccctgagccctggagtgaggtcggctgggagcagcagagcagccggaggaggaggagcaaaccccaggccacagcgtgctcctggagggaccccgattttgtcaaaatttagatgcagagagaaaaagattaaggaaaataccaaattaacgacagcagtgactgctgggtgtgacgttttgggcaggcttggttcttctcccttttgctaggtgtcccacaggaagacggacccagcatgtggggacctgcacccagccagtctcgccctggctcagcctgttcactggcgctgccctgccactgagggctgaggtcactgtccgtctgggcatgtctcatgtggtctttccttttctccccttctggttaggccccctgagctcagccacagccacgatccccactgccgcctcctccctgggactcgctgatgcctggtgtggggagggtgctggctgctttgggtgttaccccccgttggaggcccccgtgccgagttctcgagtgagatggctctttccattttcccccgacagctgcctcggcctctgtgctagaacagggagctacagctcagtgaccctgtggtgccttgtgggcctgtgggtgccagggctccggggcctgggccttttcctgcttggtgtggctgaccgggacgcggccgaccccaggggcatactggagctaggtcttcctcgccatgtttccacagtgagccctttggctgcacaggtcacggtctggagctgttggaggaggctgctcagagctgttgctgccccaccagacacttggccaaggggcctgcaccggtctgcgcgggaacgtcccaccggcgtctgctcatggctgggctgtggacccatacgcttgttcggaagccaagctctggcccacaggcgaccagaggaagctcgcaggccaggcgccagctccccgagcctgtccctgcagccgcgctgtgtgcaggcacgtgggccaccgcgtctcctccactggcactgctgggtctgggccgccaagcccacctgcccacctgcatcctcagcagcagcacgccccgcagtcggcgggtgcacactctgctgcagcctggatgggctggggcctcggggctcactccccaaccatgagactccttcaccgcagttgaggctgttgcagtggtctcgggctcccactcagccccaggagagggtctgaagggggtgagtccctcctcccgaccttcctgcccatcgtctccagagctggatggtgctgggtccccacagggagcgagacagctgccccgtgacggaaggatgtggggacccgcacccggccggtctcaccctgggctcagcatgagttcagggaggggtccaaagggcactcctgcccacgcccaggcaaaccagcaacaagaaactgggtggccagggcgtccgtgcacgaccccaaacttctccgcgttagaaaaaggctgatgaagacccgagacagaaacttcctgtagctgtttattctactgcgagtaacaaaacctaggtcgttccatgttctcatgtacagtgatataagcctccgcaatataaaatacaatgtacaggaatctctatcaagtaaactaaagaaacacacttgatttttacatttgtgtatttaaattagaaaaatttgctttatatgttaaacaaacaaaaccttctcatcgtactagatgttggaacgtgacacctactttaatgtaatttaacctatggacacttggctttcaacaccaaacatctcaaactgatacattctcaatgttttcttaacttaaaaaatctgtgctataaagtgaaaaatctgtagtgacgtacaatggaataacagactccaaagaacaagtgaagttctttaattttacatctgtaaaagtttatgaaaatataaaaaattatcaaagtgtatttgtacaaataaattagccagatttttttacttcacacttcagaagtactcgaaaaatacacgacaagcaagagactgtttcacagtgaacagcttcctgtctcatttgcagttcttgagctagtgatcactagttcccgtctcagactttacacaagtcttgttccacgttcaaggacaaacttttacatgtatcgtctgacaaataccagtttggggccgagcgtacttttcccgggatacagaagaactgctcagaaggcgaaactggaccaacaaaactcctgattattcaaatcaaggactcctccctgcccccaaagtacacttaattggtttgttactttttttaggctggtaaaacttaacatttttcaataaattgttatttaaaatgcaacaattatactaggacagatgttgctttaaatcatgttttggaaaaaattgataaggtgatatataaaatctgagcacgctaagaaatgtgtttctgtttcccagttgaaaattgtaattccaattttatgacaaaagaaagatgcatttgtaaggtttgtgtttctcaagactccagatacaagctactaagacttctcccgtagccgcagggtggacgcctgcaggtcacgcccacaccggcctccggggcggcggctaagacctgtaaaagcagcttttggaaacacaaacggatgagatgtcagtgaaggtatggctctagggtccaacgaaactcccttaaaatttacaataaagttattggaaaagataactatgatctgaaaagcaatatgctccgtaggcaatttcccatttcttttaattttaaatggaaatattaaagtttagtttttttaaaaaagcatcagaattgtaaagatgtgaaatcttgtaagaaaccatttacacaaaattacagtaatgtttaagtccagaatattctatcctgaatctaagatcgtggctatttcaaaagctatttgttcaacgcatcttacgaacgtggctttaaaaagggtctctgcccggccggggcgtctaggcctgcgaggcggtgccagcgtcggaggccctcgaggcctcgggcttcgggtcccgagcgctctctttgctcttgctccggtccttgcggtcgcggccccgctccctgtccctggccttgtctcggtcccgctctctgctccgggaccggtcccggtcgcgcctccggtctcgctcgcgctctcggttcctgctccgctcccggctgcggtcccactccttgccccggtcggcctcgcgctctcggtcgcggttggcgctcctctcccggtttctgtcccagtcccggctggagtccttgtcccggtgtcggtcccactcccggggccggtcccagtcccgctctcggctccagtttcggccgcgctcgcgctctctcctcctgtcctcggacgcccggccctgggcgtcgggctcctccagcggcttctctttgggccccacgtcaaaccgctctctctgcctcccttcgaaagtctggtttctgtattcgtggcctttcccctctcggaagtcggccgatgcccactgtccgtcggcctcggggccctgtccgggcgcactggaggagagcgcggagggcggcccggcctcctcccagcggtccttccggtgctgcggggggtggctgggaagctccagcaggggcctggggcccggcttcatcacctgcggggcctggccctggaagtgaaatcgcgaaggggtctgctcatttttttcagaaaagggtgcggacccccgtagtccaccaaactgcaggggtgcaggcgccctttggtttgtgaatcttggtggtgaatggaccctctggtcttcgaactgctgaggctgaatgcccctgggacctggcataaagttaggcgcttggcctctgggtccttcaaactggttgggatgagggccccgggcagtttcaaactgactaggatggggccctcttgggcccacgaaatgaccagggggtggtcctctctgacctccaaactgagagggaggggggccgcctcgggggcctttcagctgagacagcagtggccttctctggcctccgaactggaaaggcgcgccgcctctgcttcccagaaatggggcttgctctgtcccttcaaactgggcgggggcgcccgtcacctcgttatacggggcgtcctggaactccctcttctccccatggggatccttgcgttcttcaaattgggatggtgccactcctcgtggtccaccaaggtaagagggtgaggggcctctgctgtccccataaggaggtggcccatgttgccccgagaataaggaagggatgggccccttctgggctccgaatctggctggcggaggccctcgtggcccatcgttagaagcgatattctcttctggaaacggaggggctggcccccttggtcccgggaaattggggccgtgaagccctgacatccccaaagcatgaggtccaggttcccgctgaccctgaaacgggggctgagagccccccactttctgtcctggtggggggagcggggcggtgccctcgccgggtctggcctgtggctctctgtccccctctgtttcacctgcagggctgctgctccttccagcagaatgaagatttcttgggtcctcatactgggctgagccgagagccttgtcctgcgacgcgaaccccgggcaggtgaaagggtccctctcaccgtcgtgctgcagcgggaagccgggctgcagggcgccgcaaggcggtgtgggcagcagcaccctccgggcaggcctggccgagctgtctccaaccgtggcggggcgggtgccctccccaggctctgccttccagccgtcctgctcggaccccgctgggggcttttcgcccgaagcccagggggaagaggctggctctttttcctccgggactggcatgggcgcctggcccacgaggccacccctggaagcatctctctcgggcagggcaccctgggcaccacgtgccgagagcctggagagaggctccccctccccctcaccggtctcagtggccaggcgcctcgcctgccgggggtccctgtggtttgacgcctggctggcggggggcagtgaggcgggcttgtctgcagactgctgctcttgctggaacagctctgccttgggcaaggacgactttggtggtggagacatcaaggcgtccgacaccgagaagtgggccatggagaccccgacggcggccctctgctgcctgagagcttcttcttgctcctccagctgtctcttctgctcctcgatctgtttgttcagctcttctagcatcttctgttgctccaccagggagggcgtcgcagccccggccaccggctcggcaggcctctccacggagttccttctcacgtcggcacacatcctgttgggcaggtcatcaacagtcactttcgcttcttctaagatggtctcatcctcggggtcataggccacctcttcccgctcggctgcagctgcttcaggagccctttccacctcgtggcgccgccctcgctccacaagctgagtgtcgaaggccctctccgggtcgtactcctcctcagggtcgtatggcctgtcgtcctcctcttcctctagagccttatcttttgagaactgaccgaactgctggacgatcggatctaacaacggaggtgccggcaccccgtcctctgctgtggttttgggctcctgggggagacctgcggtggacccgggaggctctctggcggacgggtcgaatgatttcttctttccaaagagagtctgcaggatgtgctccagcggtgatgctgttttggaagcagacgaagcggtggaggaagctgccgtggaggctgccgctgctgttgtggctgctgtggctgggctgggggctgcaggtttgagggatgacagcacttttagcaccggtggttctggaagagggggcggaggcggcggcgacccaggaggtgtggtgctgacagccgcgtctgcagagcagagtggatacttggagggcttcttttccgactgcgggactgtggctacttttggataggccggaacgtccgcttcttccggttgaagtcgggtccgcttttcgtccatcttgtctaactctccactgtttgcgggacgtttgattttttggcagattactaacccaagaattatattcggacgtggtgactcaagacctgaaaaacaaaatatttgtgcaaattttagaatctaaatccagcttttaccctttagaggtgaatttcattaagggctttcacggggaacgtttaatagacaaaaataagccattctgtggcaaaataagatcaagtgtcaagacagttgcaaaagcctggacgattccgccccaggaacgcaccgccccgggaacgagctgggaacacaccgtgccaggaatgcaccaacccagtcctcccggagccatgtgaagggggcgactaacccctcgtcaccaaccatggaaccgaaggcccaatccacaagggaattcatcccaatcgtctgaatttgttacatattttaaattataatgctagagcagtagtgtggaggggagggaggccgtggtgtgagcctgcagggtgaaaagggcattgtcgcacatgccctcaacacaacagctcagctatgctcttcttcccctcgtgccactgccaggaaggtaacaaacagcctttttttttttttttttttttttttgagatggagtgtcgctctgttgcccaggctggagcgcagtggcgcgagctcggctcactataacctctgctttccaggttcaggagaattctcctgtctcagcctcctgagtagctgggattacaggcatgcaccactatgcctggctaatttttgtgtttttagtagataagaggtttcaccatgttggccaggctggtctcgaactcctgacctcaggtgatccacctgcctcggcctcccaaagtgctgggattacaggcgtaagccaccgcacccggacccctttttgtctttaacttaggagttgcaacacataattactctaaatatactaatattaaattatcaataaagtcataataatcaataaagcacaagccatgaggtcatccattagtctctggtgtcagaattacaactagacaggaaaaacagcattaaatgaaatggctaaaataaatgctttggactgggcatggtggctcacgcctgtaattccagcactttgggaggccaaggcgggtggatcacaaagtcaagagtttgagaccagtctggccaacgtggtgaaaccccgtctctactaagaatacaaaaattgggccgggtacggtggctcacgcctgtaatcccagcactttgggaggctgaggtgggcggatcatgaggtcaagagatcaagaccatcctggccaacatggtgaaaccccgtctctactaaaaatacaaaaattaactgggtgtggtggcgcacacctgtagtcccagctactcaggaggctgaggcaggagaaatcgcttgaacccaggaggtggaggttgcagtgagccgagatcacaccactgcactccagcctgggtgacagagtgagactctgtctcaaaaaaacaaaacaaaacaaaaaacaaaaattagccaggcgtggtggcgtgtgcctgtagtcccagctactcaggaggcttgaggcaggagaactgcttgaacctgggaggcagaggttgcagtgagccgagatcgtgccactgaactccagcctgggcaacagagtgagactctcttggaaaaaagataaaataaatgttttgggtttagaaattcagtgagcattaacatatcaaagactccctaaggctcatgtctttgtaaacacaggacagacaccacgctcacgtaaagcaccgaggtgctcagcaaacaggtggcaaagagcagagcaggtggacgacgcgcactgggggttttaaggcacagtattagtttaaaaaaaaaattattcaaagatattcccaacgtcgtaagttgtggtaacttcaatcaggagtactaacattccagtaacgaccatccccacactcataatcaatcaagaatgccaaaggggaatataaaaacccacatcccaaaacaggagctgaaggaaagtgatacacgtgggtgggacgtttcagcggcagcgacgtaacactatgtgagattaaaccgtaacaactcaacggtacagataatttaacgtgactgtggtatacaaaaggtgctcacactacagattttcttccccttacagtgaaaaccagtatgatttcccgtgcttcaggtgatgttaaagatcatcacggactgcttcaggcaccaccatgtagttctaagtacatctgttgttcatctccctaaattccactaaggaactgatggacaggctgagcacggaagatgggtgaaggcaggaataccaggcctgccagactgagttgggaccagcctgctccacgggacacttcctccctcctggagagaggaccaaaggcctcttccttcacaggctgctggacagagctgagattcccagcacctcacctccacctcctcttcactctctgtcccccggatagtagcacggtgccagtgaaagggctgggtgggcagaggaggagggaagcaggaaaaccagccgggccacaccgaagggcacagctgagctctgctgctcagcaaacctgtcgagttcatgttctgcttaacatgagttgaacatattttaaaacggtatttctctcagcacaacagctatctgtttactgaataagctattacacagcttactcaaatccacttttcgggtatgttcggttatgaaattggctattatggccttcctggaccatacatctgcagagcccaccacgccctggggtgaagggcactgaggctcaggctgagttctgtaagccgggctctgtaagccaggccctctgcctgcagaacctgacacggggaacagacacaggcatgggctaggcctcgggaaggaccctgggcagtagggcttgtggggcctcgtgtggggaagttacctggggaagcctagtgctgactctgacacagaggggacatgccacccaagggagacactcagcttctaaagggctgttagggtggcagtgtgatgtacaaaatcactgttacgtggtcccgtctcgtggtgtgtcactagaactcaaacttttaatggctaacttgcttgttaatgaaaaaaataattagtatatcccaaccctggcaagactcgttagtcttgaaaacagcaaccgtctggagattggcatcaaacacgcagctggcacgtgtaaatgctcccagctcttggtgctctcaactgcaaacactggtgactgaataaagaaagctgcagagtcagatgggtgctcgttctgaatttccccgccatttaaaatttaaattgggctgtccaaaaaggcacacccgctgtgaaacagtcaaatcttgtcacccaactcatgtttgttattatgtatggttgcatgaatatgtaaaatgtggcaggcgccttggaaataactcttcgtggaaggagcagtgcacttcgcctggctggaccttgggagccatcttcccctggaggaaagggtgtgcctgccactgcctggcatgtccagcagaccagtaaggtcgaaaggtcacagagcccccacctcaggggggcagtcgaggttgcccaggggctgttcccaggctagcccctcccctcggcagctgccccgtggtgtgtgagccctgggagggagagtgccccgggaaggtgcagagactgaggcctgcacgaagctggcaccagccaggttgcgggtggcacagggcacggtaggcttacttacccaccttcctcctgagggctactgagggcctcagttcataaagcaaccaggggccggggctcaggagcaaccagggaccagggcctggagacgccagctgcggctaaacgtgcccctgcacttccactgaagggtactgatcaggcctggaacaagggtgtggatgttcccccaacgccctctgaaaggccagaaggcaaatggctttcttcagggcgtaccacgtgcaagccaacaggcctttttagcacatctgtgtcctttgcgtattcatgacggaggggtctggactcagtggtcagaatcagaccacacgcacaggaaaagaactcaagaaactgaagataaaagggtgtattcgaaaagctgtgtgggccaagaccaaaaccaggatctgtgtccaggtgtgtcgcaacagggactgggggacaaggcagctggcaaagggaaccacctgcttctcagggtgcaggaagcaccctcggtactgaacctgaggctgcaggaagacgctccttcttactaaatgaaccacccgaaacctgactcctcccaaccccaaactatcacagtgaggcctttacccctaaagccacctggcacatcccactatcagtgatttaaaatgaaaactctctcaatggtctgcacctgtcaaaacaaaatgttcacacctgctggaacagaaacggtgtggaagttaatcaacaaggggtgacgtatgacttggatagaaagacttggcaattaaggtgggaagaagtgacttcccccaacccaccaaacacacccactcacacacacacagaccctcccttgttccaactgggaatctctaagacctgcacaaagccactgggtccagcacgtctcaggtaagaggagagcgacgtccatcttcttctgggtgccggggtgccgagaagggccccagggcagcaccagcctgcactgcgtcctctccagcagctgctgggtgggctgcagagctgggcacactagggtgcactgcgctggcttatggaaagcaaacaggggcctaggataggtgaccaggagccaccaaatggttccaattcaaacaaacaaggaccagtttccatgaaagatgtttattgatttaggaggagaaggcagtacattccattcaatactgtatttgactctgattacaatttccatgcaaagctactgttacatacacacatgaaaactgaagaaatgcttacctgacaatatttcaagtcagaatttctcagctaatttagaaagcaattaaaagtgaatacagaaagacactatggattcaaacattcttcccagaagagctttctaatgtataaagacctcagagaaaagagccctttccattcgagcagctacagagggcggtgtttcctcctgccctgtacttggggagaacagactgtgcacccatgtttatggaccgaggttactccacaggcatttcagaccaaggctccgaggcctgcggcttcacgcggaaatgacgggggctgggcatggttaacaggcaggcatcttggctgcggtccagtcctgtaagggccctgcacagaaccctacacgatgagctttcaacctgactcatctcccttccatgaacaaggccctgagacaggccgggactctgcgaccccaagtccctgcggggggccctgttggtaaagctggaactgagtggggtgaacatctaggtggagaaggtcacctggaaccaggcctcccagctgccccccaccgtgatgctgagttacagagagtgcccccactgcggggcagaggggcagaggaagacaacccggtgtttctgtggacaaatcattaagatatgcaaggacaaatgtcctcagggagatccagctactgctgtgaactgcatggctcctgagggtgctgcgggggcagctccactctcactgcccgacaagggccaagtgctgacagggcgggtgacttaagtttcccctgagggcacagctgggcaccttcaggccttcacttgcttaagtgtgaacagcaagcactgagggggctaggactggacaccacgctgtcaaaacccactaggtccccatgtgtgggaggcatggacacctgcaattgtgtggtataaactgaggcacatggacgagtcagtcactcttttctgcgtgaatctctacccccaacaggaccttctccttaacatccccaggggaagatgctcccacatcagtgccctgatgcagacgggcagctcaaggctggggcgccaggtctccttcaggcctgtgctgcatgtgccgcagagaactgaggctgtggaatggagctgggtcctgcagaccctcacccagcacttctgggggcgtgactccaagctgcgcagcacacgctcacccctgaccacagctctgtggagtcaccaccatcagcaccctcaggtgtggcctgtgctgtccaagggcttctgggctatctccgtgaggacagggtccgctgagacaggggaaacatgccaggacctagccttacacacacacacgcgcgcacatgcacacgcactacacatttacaccacaaagccaggacacacatgtacatgtttatatctagaaaacgccaagtcaagtaatcagtacgtgaagcgggccgagtacccgatggcctggcccggggtgaaggctgtttagtgaccatggaagtgtgtgagatttcacgcacacgcattcatgtcaacaaggacatcaggagaagttaacattatactgaagtcttaagttaaaacatttctgaagtgtatggaaaggtttcactagctgttacttttctaaagtcccttgccctgtgttactttacccagacgcctctgctctttatcgtggatcaaagtccctggggcttttgtgtgtccccgtcaggcggcgtcgtggcctcagcaagtgccttggtgggcgagtgtgacgttcccccagctggtcgcggagctgacagtgtgggtggttggtgccatcgcactcagcagacaaggtgagtgaccccagcccagccctccttgtcccggtgccatccgggaggtgctgggagacctgtcctttccctctgccccggggctgcacctgcacagccagcccttgctgtggggagaatggaggcgccgctcctctggtggcctccctgggccccgtcactgcccagtgtggggaacccggtgcccggcatgcgccggggctcgctcaacaccctacaaccgtgctcacctgacagctccaagtttggagatgagcagggagagaagctcaagaaaggatgaaatatcgcctcaattgttttaaaaaggggaggctcgctatctaagaatcatgtttctgtaaagaaaaagtgctctttccaccccggtagggaggtgctgaggtgctgcagtgtctgcactgagtgcacacactgtcgcacttgcaactgaccagtgggtcttcacaggtgcggagaggccagcttctcggtcttcacctccaggagggccgggcttttcctctccctggtcacgtggagctggccagagctcttcacaagcaacaccaagaacctctaccagggtcctttctgccacccattaggtggcatctctttatcccaagtaggatttgaggggacacactaaagcactttgcttttaaaaatttatctggcactaaaataatttaatgcaccacgccagcaaatatttaaccctgaaattactgataccaaccaatccctttatggacatataattccacaacacaggcataggctgagcccactccagctgtgaagaatgggctccagtaggaacgtgggctgtgcctggggcgacagaagtcccgcccaagatgtggagtggcccctacaggaccccagctagctagggtgcggcatgaggggtgtgggtgggaacaccctgcacagctatggcaggaacacccgccgaggcctggtgacagggacagagggcactgaggcacagggtccagacagcacctgcctttatgacgaagcacttcagaggacactgtgtgatccacacacccgctttgagagaacaccaatcctctggggactgcatggccacggagacacttcagttgggcatcagatactaacccctaactgaagtcacatcagcttcttctaaggggctatgaaagagctggtcactaacagagcacgtggcccctggaatcaccctcaacccttgacaaagatgtattttaggctatttgtaaataatcgtttaaatacagtactttccaaggaacgtgcaaacacaaaatagcttgccaaagatgaatgaacctattacaatttgagctgcagattttaaaataattatttctagaaatagttttctatgtcattattgttaagtctcctggaaatccatccctgttagagaagtgatccctgatggagccacttcccggtgtgtgctggctcccgagtctgtctagaggaaagagcagggccgctgggagtgtcacctccctttctggctgagccttgggcttctgggcactgagtcttctctgacctgaggccaagatgagctggttgcaggctgtgggtttttccctctctaaaaaactctcctaagacaatttatgctgtgaatcaggggtacttctcgtgccacagtcctacgccctcaaagatgaatcctattgctaaccgctgcgtctgtgctcctaactcctgctcccagagagccctgggctggtcaggactcagcagggcatgtcagtgggaggaggggtgcaggtgcaggtgggcctcacctccacccagaaagccggcgcttacctggtccctcaaagggcaagagtttggatggaacagggtcctgggcgctcagcgggatcaggtagaggtccttgacgtgcctgttgttattagctacaacaccaaagcggccacggctgctgaaataggagtagagagagatataggcgacctcctcttcctctgtggcggggtggaagcggatcagacagagctcctgcaatggaagagtgggaagcactcataaagaaaatgtggctcaagcatcacacgcccaattcacatcctgctttcaacaggaaaccttgtcagatctctccgactcacagccacgatctcacagagctgctgtctcagtgaggcaattcacgtgacatgtgagcccagcagtgtctggagccgagccggctcttcctacatgcacgacggccccggtcacgaggaaccagctgcatgatctgcaatggctgtctgtgcccctccctagagggggttaaactagacgacagggtctagccctttcgtgaacctgacgaagactacagagattccccagagaaaaccacagacagacacgcacagctgtagctaaatctcagggggtcccagaaaaccagaaccgttcaagagcccaggttgagtgccctgagcctgatcacccctgcaaaagacaccttctgctccttcaatcataaaaaaacaagaaaataaaacgtatctatttcttcctaaaatttaaccgcacatacattataataaatcagaaacaaacttctaccgcggcacactcagacaccttcacacagtcatacaactatgtaaactttttttttttttgagacagtcttgctatgtctcccaggctggagtgcagtggtgcgatctcggctcactgcaaaacttaatttttaacattcacctggaaatatctagtaagctacaggctaacattttaagtgttaacccatccaaacgagaggttaaaaaaagatgtgtttaaatcaacacaattttccatggttgcagaatttatactataagcaggtaccttagacacagaagacttgagtttgccaacataatcccaaactgtcttcggtgcgatcctcccaccaatgtgaattgtgtcaggcaaatcctaaacagaaagtactttgcgtaaatcactttgaactgtagtagtcacagaaagacgaatgcagccatgtgaaggcacacactacccaagattcaagaagactacagctattccaaggaaaagagtcacacttgtattaaatgcattaagtccaggatgacaagtggccaaatccaaagggggagtgatgccaaccttctgccagacaagattatgtttagaaatgactgcccaacacttctatgctgtctttacgtacatacacagagagtaacgattcactatgagccagggtgactccttgcattaaagtcataaatgctagtgctgtcttctggttaattctgaaaactaaaaggcctgccacggggtcatatgcgccaccccgcaagtggccaggtgtgtgtaaagcaggctccgaacacctggctgtgccggtggctgtgcgcacagccatgtggtcagtgccccagcgaaaccgatcactgagaggccagactgcaggctcacatttccgaccctgtccaaactgctgaacctgcggactcatcacggccatcgccactttgcatttagagccgtttctgcatccagacagacggttgcaagagtgtcaggcatttctgtttctctcctacctcatgaattaagggagaaagtcatgtgtttgactctagtttagaaactcctatgaaagacacacacacgcacacacattttcttggttctaacctcactgaggtaatcaaaacacccagagacaggatacgccttagtgacaaattttgccacactctgcatgttaataaatcctttccaaatggtgctgagtcgagacaaaaagagggtcgtgtctccctctggaggggaacgtgattctgaagtgctgtaaaacaaaaccataaaaaaaaagtcaatgtctctctgtgcaatgagaatttcaaaagtagaaagccttttttttttttgagacaggatctcattctgtcatgcaggctggagtgcggtggtgcaacacagctggctgcagtctccgcctcccaggctcaggtgatcctcccacctcagcctttcaagtagctgggactacacgcgtgcattaccacacctagctaatttttgtcttttttgtagagatggagttttgccatgttgctcaggctggtttcaaactcctgggctcaagcacatgctgggatgacaggtgtgagccactgtgcccggcttcaagagtacaaagactttatatgtaaaagcaaaagtgaacgcttgcaagttttacgtttttggtagcttacttttgccaattacttactttaattaaaatgatacagacattttggttaaagaaaaataaagtgaataggcaacaaaactggatgagcacaaatttaaatgtcaatttctaagatctctacttccaaaaggacaataaggcaccctacaactggggctttttaaaagatgaaagagtgaagctgtatttcaggttacatttccaagttcaactatttaatcaccagttatctttcctttcgttaatctaaaaaaaaagtttggcttgttcagaccacacctgaagtacgcacctgatatttggtgacggaggaactgacaggtatcttgggtcaggagatgaggatggcttagctagtatggacttgggcaccatcacagaagtcaagacaggcttcggcacatcctgtctggcttccaccatgtgggtgctgtctgggcgggatgctgcggaggccacggctgtgcatgaactgcttggagcggtcctggggtcccggccggacactgtgacggtggtgaccaccccgctcccacaggaggctgggcagggggacaggtcttccagcggggagggctcgggatggccatctcctggaggcccagggaaatacgttctgtccacatttggatgagaagcactttctaggcctggctcagaggcaacttcaggcacagcctccggcatcacctcatcagctgaatccggagctgggtcaggtgcagagctgtcatgctttgattttaagtcttctttcttaacagaagctgacaatttttgttttttcggagctggctcatcttctgcggagggaacctggcctgaagaaggcgaggaaaggctctgtgagaaacccagccggcacactggtgtttctcacacaaagccgaaagcaatactctaaaggcagggcaggaaatcattctggcccttctgcgtgtttaagcttacgtgcggttgcttttaggaggttcagtgatttttaacaaaatcaagtttagtctcagctccaaggctccatcccctgcactgtgctcacctgtgcaaattttacagttgagatcgaagaggtgtgcgcggtgctgactggtggtgtctttcaacatgctgctgaagacgtcgagaagcggcgctgtgctcttctcagggacagcacgtgctgactcttgctgttcctaaaaaagaaaaagaaaaaaaagtgaggtcgtttcttctccaaactcagctccaaattaaccacacacaagaaaagcagtctcatgggattgagacccacgggggagaaaaaaggaccatctaatacaaggactgaggaatgccacaatgacatacacctgctgtaagctcaggtcctgcccaataatttaagataacctcaaaacatttgggatggattagtctattctcggtgaacacaaaatctcccaaatgcttacctctgaatccgacactggcggagagtcctccagatcggggatggcctcctgcctgggggccgtcttcttgctttcattgtgcagtttagttctggactccatcacctgaaatgaaaaagacgaaacagagcttaggccttgttttctaggaggaaagcatcgcttatgcagccgtctatgaatttatttctattaagctcgagtcctgggtgcctccgcaggtacccctcagcactcacagatctcgctggcctctctttccacgtggaaagctctttagatacaagttcttctggcttcagtctcacaagtttcgccaaagagatttcctcacgcagaacacgatggaagagtccctataaacaagtatttttcatttactcaaataatattcctatatctgtcaatacagagagcttctggaaaacacagctgcccagaagtttagcgggcacaggacaaaggccctcagggcccacttgcgtgtggcactgggcagagccctccctgcagggtgtgacctaactccccaaacggccttatgagagtgcgccccaggatatccctgctgtgagcaaatgggagcccagagagcacaggtaataaggttcaacagtgggtttcacggcctgtgctgcactggctctgctaaaaaaaaaacaacacacaacacctcaggaaaaacaattatgtacacaaggtggacacaagtcaaaaaggtagcgtcaggaacaaaggaaggaagaaatcatttctgtttagggctgttcaatggtgagatgcaaagtcagggtatttcattatcctaaaattctaaacagggaggagcctggaggccgatggagagagaacaccacaaggctgtcagcccggcggcctatccctcccagctggagtttctgtcctcgtcgcatggcccatgctgcagtgaggaaggactgatcccactacctgggcgtgagcagcccctgctccaagtggtgagaactcaagcagcccaaaccatcaggctcactcggctgatgaggaatatgagaaaataaggtggaaaaggctgtctgaggccggaatacggacaccctcatacactgggatgaagaactggactttattttggagcccagtgaagcgactggcttgtacctttacagcaatgtttacaggagactaatgtggtgataaaaggtggacttcagggaagccaggaagcggacgcgaccctagttaaggcagggaagggaaggggtttccaggacgctcaacgccagtgcaacaatacgtgggcggcagaaggatcacagaggagaaagaaacgtcttagctttcctggaaaggacacgaacatctcaaaatattggttgatccctttagcacccagcgaacagaacaggaatactccaatgcaccgacaccaggcacacacctgatttttagggtccttcaggttgaacatgatgctgcgatatttactcttgtagcgattatctgtaacttgaaacaagttaaacatctccttctcaatatggagggcaatttttcctacttcgttttctgtcatgattaagtcatcgctgtcattgactctgaacagaataaaaaaaaggaactacataagacacttgtgtatattaaactttttgaacagtgaggcaatcctgcagccacactctaatgaaagcccttccattttaatgggtaagaaatcaagcagaacagcccaccttttccacaaaatctcttttaaggagcgtctgatattttgccgaatttgtgaatttggctgcgatggtgcagcactcatagccccaaggcgtcctggggctggcgaggccattggaacagaaggtaccactggcttccttacggctcccaccaaagcagcggagccagggaacttcttggaggcagccgttgccgctgcaggtgccggtccggcctgcctggcagctgaagcaccactcgatggggtagcggagagccatggcctcttggggatggtgcccttgaaacctgagggtggctttttaatggctggtgtggctgctgccacattagcaaaagaagacttctttggcacgaggtttctaggtgcaggctgcttgcccaccgcggagcctggaggggctgttttctttgaggctgccatggctgccgctttctcctcggacctcctgtcttccttcgtggctacaaagaagaacacaggcgctgagtaagggaggacaccacagggtgctgtcacctgactctaaaaagcagacttacccttaaacctgtaagtgcccacctggcattactgaataggatacacatagagaaaaggatttgtaaaatgttagtgttcagaggagtgtaagggaggaccgccagcagcatttatgacggtgactacattttatttcagaaagaagaatgctttattattctatcttttaccttcaaccagcaaactctagttattaaaggcttgacttgcgcactagctaagcttcaaagctgaaggacaatttcctatcatcactttttaaaaggcagatttacagcagcactatcattatgaattcaagtgcaaactgtttgtaaacttcagtgaaaaagaccgtttagaagcgtaaaacaggctctcttagcccggtgggtggggtttacacatctcacttcgttgtccttccagactggagtccattggaggcgatgccattaataaaaatatggaaagctggcatacacctgaaccacaggaagagcagccacacctttacgtgaagagtgagaagctgagaacgcagcaatgctgttacaggaatgcgtccattcacagccctcaggctgtaattccattaagtgaagtatgaatccaaacaaggattataattaaaagctcaaagacatcaaaccccctcaacttgcacaaaaagctttctatgtcagtagagaatcaatcaccttataaccccatgtgagatcgtcagagcccaaaggccctcgagcaggggacagacggcgtgccaggggacagatggccaggggacagggctcgttgaggtgcaccgcatgccggggcagggatccagctagtggagcagagtgaaacgcctggggaatagggggcccccatgagggccccaggatggcagaggccatctcagctctacaggcaagtgcctgggagctacctcgggtgatcaagtcaacaaggcacctcctgaggaaaggcttttccaacgatcggtacagcagcaagcctccaaaactcccaaaggcctaaatgggagaatgtgacagatgctcccaagagcgcttcagttctacccagggactgaaaatcaaaccgcactcctcccccgtcgtcttactgaccgctttcaataaatgaggtaagtctgaaagctcaggaaagagccaagactctacaaataaggcctgattcaacagcctgccccagcttggtcctgcaggatatcccgcatgtgctgccaggcttggccacgttggcagcgggtgccagccctccccagcagccagtccatcaagcagcagcctcagggctgcaagtcttcccaacttcccagataagtacaactccttccatttttacaaaacttgcaacagtactacatggatccaaaaagcggtgtcactgttaacagataccccaactttcaaacaatggtgtcactgttaacagatattcgccccgactttcaagatttccatgtgttctttcctaaccatcattttaatggtaactaagtaaaggcaaatcctgtattttcatcttaggacccttctaacctcatggccggcccctgcctaccccttgctagatgtggtccagccacaggaccccctccttggcaacactgccaagccctgtctcctcacccacaaccgcaccccaaaacactcattcctgttggagctggatcttaaaagcgcactataaaaaatggcaacgtctaacacgacaggaacaaaggtgacagctagtttttatctgtccaggaaactttgcttttaattccacatgtactatgtcatcagatcaggtctatacaccccaggagtcactaccttagtgtttgaaaatctgtttttaacaactcagtttaactcattagacttagctcacaggtctgcagcatcttgcctgcagggttgcaataggtcagtcaggttaaataaaaatcagtggaggccctttttcttgggggaagcagcgagggggtggggtgaggatggaatgaaaaggcccagcaggcctagggcgctggaggcacaccggcaggaggctgacaccaggcaggcaccaggaaccaagccccggtctccagaggcggcagacagacacctgccgggaagccaaccgtgattcaaactgaaacctcaaaccaattcagtgactgcactagaaaccttggagtgttttaatatcacgtttaaagaactctaaaaaagctggctgaaagcatttccagaaacctcggcaaaatgccttggctgtgacacacagaacacctgtgtgctgtgacctgaacggtatctttaatgatgtttaacgctcaccttgttgcaagttagggttacatgctaccttcaaaaccatcaactccatttctccagatcgtaagtgttggaatgaggcgtccatggccacactcagatttctgctcgtgtaactacactattgtctccctcacttagggaaaacccgagttgagagatgagttttagggcactcccagtacatgggtttaaaaccacccattacccaagagtgggggcagcagattaacgtaatttattttaaaagcaggaaatagctttccttaaccattgctattttagaaaattaactgctccctttctaaaggcaacctttgtcatccctcatctgtgctttaaagagcatggaaatgggcagtcaggtgagtgaacggcagaatgttccaagccgggcctctgggagcagtgtcctacaacacgcagaaagccccattcctgctctgaacggacatgttctatccagcaactgttccagggacccgagcacacacccattccactccaggtgggacagcatggctggtgctcaacttgggtcagctgctgctgaaatggggacagaaactttttagtggagctaaaattcaatttgcaagttcatccaaatttgctttgaactattacgttgtgtataacttcagagaagggcaagcagcaactccaggcaacccaggaaaaaaccccactgcagaaacacagggctctgtcagggtacgagcctcccctacacgctgctgggccccctgggggcagcagtggtggtgacctggtcacaccgcacagcactgatgcctgagagccaggggtcccctgcccctccccacacctctctgccccttggtcgcagtgctgtctcctttagctcccacattctgggggcctgcccaggccactggcccagatgaaactgttgctgccgggtctgggtttcagccaactgcagaatgaagcaggtcgtcgtcgtgcacagggatcagcagcacactctaattggccaatttcccccaaagcagaaggctggctggcttgggtgctacagcgcctctggccactgggtggcaccagggcctgagcagagacggggaggagaaaatcaggcccccactggaggatggtgctactccgctcctctctgcagaacccatccaattgccccagtggaagttttagcaggacagggattaaaatatggggcaagagaccaagtctgctcagttctggactgtccagaggcccccatgtagcaaccttatgtgctggatggctccccacagggaaaggaactggttataaaaatcactaaaataaacaccacacgccctcacgtaggtgttgacaatgaagtggcctgccctgtcgcggtactgctggctggtttagggaagctggggcactcagacctccactggtctcccacggtgtcctgaatcctgcctatcaccatccgctacagctctaagggctgtttctatgctatgcacctgaaaacagactcaacagtcagtgaaggaactgtggaagtaaattctgttcactgtgacgtcaggcctatttgcagccctcagtgaggcgtgtgtacaacaatgcagtttcctgctttacctgtttcttcactccaagattgcccctagtgggaacaatcaaggtggcagcggcaagagaaaatgttctgcttttgctcctctcaacatgctagaatgtgttcacatgaattcgccttttataagtagttactagtttgctttcatgttgcggggaaacagttacttcccaaatacagcaggcagactacatcgcagacgctcctcagaggagaccatcactacagccaggacgcccttgcagggtccacagctagactgccgtgttttggaatactcaaagctttccttggtcagttttcttactaatacccgctacttgagtgccttccaacttaatggagaggtgtgtaattctccctaagaaactcgtgtgatgagggccacgtggacagatggacgttccactcaactgcaatttcagttgtgcccagctgcacatggtgtgtgcctggctgccaagcccatttgggagcagagctgctgctcttcccaagatctcccacacgagtaatttaacctttatctaagttgtttactacttaaaccaacatgttaggggcatgttaaaattagtccacaaccctcccctgtaatccctccagtcctaaagggccatactcagtataaagcccctagctgacagcaccaagcaggtcagttgaggataaagccagttaccttaagctcttcttgccgaactcttccaggtttgcggcaaatgaaagttgccgcaaccttcatttaaataagtagcaaaaattcttgtcaatattctaagttacttctctaacttttagaagctaagaatataactatgtgtatgttgatgtgttaacagaaaaaaaaaaaaaaaaacctagtattattttacaactttatacaaatctacctgaaacttgtgtaccacattggaggaattgtagcaggcgtcttcagagctgacctctgcactctgtgacaccgagaatgccgaggaggctttcccgagtattcatctttagactatgagtagatccacagctccgaaaggtcctatgaaggtcactgaagaggtggtgaattcagggggaccgatcctgctggaaacttccatccctgcaccccacctgcccaaggtggctgaagcataagcacaaaggggcacctgagggatggacaggggcaccacgggacggtgctgatgtgggacttcaccgtgcagggtcacggttacggaggtgtgaaacctttccctgatgtaattttctcaatggcaggctgctttttaagtttataaaaagtaaaacacttaaaaataacaaaagaatgtcattactgacagccaagaaacttccagttatatggataacgtaaaaaaacaactatcaagctatattctttctcagaacaaattctgatttttctaattgggaggaagagattggtggacacgtagagtctgatgactcccagtctcgttttattgccgctgacaactctggaggagacagataaaaaaagagctcacgcgaccagtgaaacaagccaccctcctctcccggctttaaattcctgcaaaacactcttaggttctagaatccccccatgtattttttattaatgaaaactgagactgggtcctcttaggatttcagtgaaatgtgcttctggagcccacaccatgagttatccttgtgaacggtgttctccgtccatttcaccccaccagggccatctctgtggcagcacgtgggaacaagaggcagtgcttccacctgggcaccatgcttaacacagcatctggatttgggtttacaaactggcaacgttttccattttaattccaacggttagatgaaacgaactgtagaatctgctttgcagtcaaaatctgttcagatcctcagtgtttaagtcacttaatgagccatttagggagacaaaatactagaaattgcacctatcaaataccatctcaaaattttgagaattccatctcaaaattctagtcagtcaggtacatctcagaaaaacatttccaactgacttcatgcctcgacaataatgggaggtgaacagtggaaataaagagaaaaaaatggaataagaatttataaaaccacaaaagaaacatcatgatctttgagagaagttatgtgcaccaaatgtttacgtaagctaaataaactgtatatataagaaacaatttttaaaaacaaatgggaggaacaaggtgaggctgtgaaggacctactgatatcttagcagggggcacagcctccttctagcaatggcagagtgtctgtgcacaccaggcctcacctgttggacaggaacccccaggtcaaccgagtgccatgggaaggacaggagggtgcctaggtgcactgtggggagcagcagcggtagctccaccacgtgggtcttctgatggtatgtgtggtgaggcaagtgtgagtcagctcatgggacagacccacaccagcctctcacttccaaactcaccccctaccagggagggcgagctccgtggccagccagggaggcagggcaggggcctcaaaggcatacagtggtggcaggctccccagtacttgttgagcctacaaaagtgcagaggtgtttaggggagaggcagagacatggtagctgctgtcaccaatgtctctaactctgctccaatcaatcaccttttgggaagacaacatttacgggataacaaaacgagcagaagctactagctcaaaagtgtgtcgtccccattcccatcctatacaaattctggaaatccaccaattttaacttgaggtgatgtgttgggaaggttaacaggcaatttcccccacctcctgtccctggagcaaatcagcttcccagaggagctgatgtgtggcaaagaagggaagagggagaagaggtcagagtaccccgctatgggcagaagagcagcctcctggtcgacctctccccgctcacagtgcaggaggcaggcaggaagcaataacccagggctgagagcccctcatttccccatcttcccaccaatgctccctccccacaatgtacacggactcttccaactccacatgtggagtctctggcagcttttcaattttggttgacacagatggaaattaaccaaactgaaattatcacccacttatctgaactgaggctataaccgcagtttttcttttcttcactgttatgtgtctaaaaccaatgtacagctaaattttagtacagcattaaaaatccctctctgcattcacaggtgggtgacactttaagcccattagctctgtagaactgctctatcgtagaggtgctagaatctgatgaacatttgagacatttgctagcataaaattctcagctcaaacaatgtaaggtatcgagattcattataatgcagcaattgcatgattcattttatgtgcggctcaatttcttaggtctaggctgtttacatgatcaaaacgagggacatatttttcttcttttatgaagctactcatactcaataactgcatatttttagccaagcgctgtggctcacatctgcaattccagcactctgggaaggccgagttgggcagatcacatgaggccaggagttcaagaccagcctgaccaacatggtgaaaccccgtctctactaaaaatacaaaaattagccaggcatggtggcacgggcctgtaatcccagctacttgggaggctgaggtaggagaatcatttgaacccggaggtggagcttgcagtgagccgagatcatgccactgcactccagcctgggtgacagagcaagactcttgtctcaaaaaaaaaaaaaaaaaaaaaaaaaaagtgtcttttttgtaaggcacaccagacctagcataggtctgcttgcctgcatgagtgccttcccttagggaatctgctcaaagtctgacgacgggaaagtggggcactctgtgatcatctttgaattgagactatttaacctttcggtgctttttaaaaaaagcacaaaatgcactatagacagaaggcattaaagactgaattgaaaatagttttatagcagaaaactgagaaacaagaaaacattaaaattgcaccacagaatctgaggtttcaaagatctgtttgaaatatcttcatttcattaatttgaaatttggggcaggatatgatcttaagagtctaaacattcaagagacgagggcaagaaagccagtcacatgtagaataccaagtccaaggcacgcgtcctgcggtcaggacagtgttctaggtgtgaactcacttaccgtggggcctatgaagcaggagtgtgtggccttcgaagttcgaatgtgttcatgtgggtgtgtagcgtgtgaatcggacatggaaaaaaaaaaatcccctatctgcccagtcaaaaataaatgtacacctgaaaatcagatgcaacactaacttgcaaagattcccacaacataaaaaagaagtgatgctttcatgtgctggccgtggacaatgtggaaaaactgaagcgtatacagcgctgttgtcagaacaactcatgtgcagacaggggtggatgtggcgtgccgggcagtgtggctatgcaatcagactgggatgaagagaatacgaatacttaccagagcctgagagtgaaaacagagattaaagaatcaatcattaaggtgaacgttcaccagtgaggtttacagctttggaaaacagtgacaggaagtcctgacagactagggatggacacagggcagcaggaggcatcctggacatgggctctgcttcccgctgatggtgcagccggtgtctgtgatcagcttaacacaaagctgcaactcccagtcctggacaggcccaggggatggctatccagaaagaacgggaggggtccaggaggccaacccctaggtgatacatacatttatacaacagtgacggcgagggagcagcagtcttttctggctttactgcattgtaattgtgatcgctcgcccacgacggcgtgctgctctcacaagctgcttccttcccgagtgcttcactccgcgcagggaccaccactgccttcttcactgtggtctcttttttttctggagctggtctcttgtgcacagaagagattttaatacctgcctggataatcagtaaaaccccaaatcattaaaaaggtaagaaatcataccttcacttcatttcactgagagatgaaggcggggacccaatgtcttcctgaggccatctgaagaccctgcacccatcctgcgcctgcttggcagcagttcaacacacttgcgtattcggtgggcccgcggtgggcccgcagtttccccgtgcaaaactgagaacttcaaccacttgtgctccgtgaagggcggctggcacagagtcacctgcaaccctgatgaggtgccaagttgccaagatgacaggagcagcagccactggacaggctgccaagatgacaggaggagtgcggcaatgaaccaaatgagccaaatgagaggaaaggcctgcgcgcgaggctgtgcccaacgccgagggttcaaaaggaccagccttaaaaattaagtcattcaaaggctaaataatcatttgaaaataatcaagaaaactccctgaacagtgctagttgcgctttgctggtcacaaacataaccggggcagtgacacagccaccgccgcctgagcctcacaagggccttcaagtctaagacaagagtttgcgatctctaaacattccaaataacacggagttctttccaaataacacggagtacaaacatgagacaactctgagagccgggtcttaaatgaagaccacagccttgccccgaacccgcctcccactcctacctgcctgcaagtctacgctctacaaactccaccgggtggttaccaactcttctcacaagacagcagggtgtgtcctgaagtcttatgccccccgtacactgccattgtcagcatttgctttactgcacttgtgttaattaacccctcagctaacgggcagagaagggaaaactggtgggaaggtggaagacaaaggtcaaggcgacaccacgtgtgcgcccccctacacctgccacccccacacggtctacaaaccaacagttctgcgacaaacgctctcacgcctgtgcgtccactgcctgggcggctggtcctggtccactcacctgagcaccgcatttcggaagactgggcttctctggcttcatcttcatcttttctttaggctttggcttctgttctttacctgagcttagaaacttcattgtcgctgcggcgtgtttgaggatacagtcattactgcagtacaccgagtcgggctgcgccacgtgacagcacccggggccaatacattttgaggcaccaggcgcctctatcacctgcagaacaaaacagatgacttcaaacaatgtacttgccaattttaagcagttaagtgtgtgttttgtaaaatcaccatttatagtaccaaggccacagtttcaaaatgagatactaacagtacttttaatatgaataaacattttgttgattcaagctatgaaaaagccaggtaaggcattcacactgtcactgcccgtcatgccctgcagggggcaggagtgtgaggagacccctggactgccgccctctgctctgtgcacccctctcgagggtgggcggggcccacgggacctcacatccacgatgaggctccgctagaggacccacatgcagggcttcttcagatgtaattaaggatctaactgggatgactgcaagtcaaatgggtccggctaaatcaggtaaaaacccttaaaaaaggaactgggtctttcatgaagagagaagacttcatagctggttttgaagtaagcttccctgctttgagaggattagctgtggctaggatctgagggcaaggctgccaagtaaaatacagtatgccaatgaaatcggaatgtcagataaacaatgagtaatttttcagtgtaagtatgccccccaaattgcatgaaacatacttttttttttgtttgagacagggtctcgctctgttgcccaggccggagagcagtggcacaatcatagctcactgcagccttgatgtcctgggctcaagtgatcctcccaccccagcctccccagtagctgggactacaggcacataccaccacgcccagctcattatttatttttttgtagagatgggggtctcactacgttgcccaggctggtctcgaactcttggcctcaagtgatcctcccatcttgacttctcaaagtgctgggatgacaggtgtgagccacagcacccggccagacacacttatacagtaaaaaacagcgtgagggcttctggaagggaatcccctgccaagcctctggagaccacagcccccgctgcaccgtgactgcagtcctgtgagacctgagcagcaggtccaggcttcccatggaaatggaggcataaatgtgagctccttcaagccaggactgcagtaactcatcgtgcagcaggaggaaactcacgcaccacaaacagcttgaccactgctgtttacaaagtctgtctcgatgatcaggcctcaacacacacgaacatgtccctcacacatacttaagcgaaaccttatttctcaaattaaatatttaacataatcagttttcctccacagaatctaagttttattgagaatacaatttaggtttgtgcagggtattgtcaagcacaatgacaattaaaaaaagatgttgggcgtggtggtgtgtgcttgtagtcccagctacttgggaggctaaggtgggaggatcactcaagcccaggagatcgaggctgcagtgagctgggactgtgccaccgaactccagcctgggcaacagagcgaagcctcaactgcacaaaaaacagaatcaatatatttaaaaaataaagacataaagccaatgacttttctcatgaattcccatctccattcatctctgaatgcccagatgtggcctctgatagcagcgcagcatgagccttcagcccctcctgcctccaagggcacgctcccaggtgcacggcccagccttcggacatcctcaccttgcagctaatgcagtgcaagagtgtgaaggcagagatgcttctagacacagcaatttccaatacctgccagaggacaggcagctgggtggggacaggcccgggaccctggagggaccagagtgaaaacacgccaagtcacacctgccctgtggggactggaatggagactgcaaacacaagacagcagcagaagctgacagcatgtgggaaatgtcataaacatcagggggagagaattaagtgtcaacacagctgcaagacagagaaaccactctcaacacaagcaccccgaggagccagcaccagaaccacgaggcagctggagacagcaggtgacacaggagcaccgccactcccatcgttcagaaacaattcctttctgctaatgcatacaaagcatgtaagcaacacccaaatcctcaaagatgggctgatttcaacaattaagtcattaatagtagaggaggtagacagggtaagaataaaaatagaaaggcctcacccaggtggagtgaggcaggaacccgggagaggcaccgccccacatgggtgcagcacccgtcctgggaggaatttctatctagagcgagactgaaaccagtgaggccgactgctgaatgctcgtctcagcggacaaacacttacaggctggaagatcttgagtttcttcttgccacttggatttgcagctttctcaattctaccctttatcccttggtcttcgctagacttctgctctattgttcctatacttgtacaatcggtgccatcagcatctccaggtctccatttagcttcctgctgatctgccgtttctgaatgagtctcatcctgcacttgcagaatggtgcagtttgggcagatatagtcttccccattcctttccaaaagcctccctcgagcctcagaaatgcccacacaatcgccatgaaaccattcttcacagcggtcacagcaaatcataaacctgaaattataaaataacggtattagcaatgggacgtgagtgacaagcacttttcaacacattaataagacaattggttttaacttcatgaaaaaatgcaaatatacagaaaagtagagattaagaacgtcctcatgcctttcctttgattttaacattcaaccaaatttacttcaccgttttttaagagtagcgcattttaggagcaaactctaaggcattccaccacagatacctcagcaagtctccccccaaaactgcgacaatgcctttatcccagcgccaagccaacaggctgcctatcaccgtctgacacccagtcctagcagagatcttttgagctgccccaatgtttgcactaggacacttgcggtctgcacatgcccctctgctatgtctcccaaggggcagtctagaggagcagtctcagacagaccccggagtgacggacacattctcctccatgccgtctacacagagccactggctgcacgtggctcacgtgactggggtggggcgctattcacctcctcacttgactggaaacagccatgtgtggccagtggctaccagagtggagaggtggctctaggaagtccttagccactcttatgtgtttcttttttgacaacttgttcatcttttccaacaaatcgctcatccagcccagctttgtaaccctttaaaatgaaaacaaatggaaaattctgtttgcaaccctgggatttctgtgggtgcccacacatgacccacctgttgttgtgaggctggcggcaaatgcaatacagggcgttggggtcgtaaccctcacattcaggcttcggtcggcccaagtctccaggctcctcatctttgatgtcctgagccgcctttccctccaacttactctctctgtcatctttcccagcctgggacacaaccccctgatcgttctcgggctcctgcttactgggcaggacgccctccacagtgtcactggcctcggagcccacagtctcggcgggaccctcctcccggcgcttcttccgcaggcgactctggatc

SEQ ID NO: 197 - DNA, 2504 bp, Homo sapiens
  POLQ
cgcaagcttcgcctcttgggttcatgccattctcctgcctcagcctcccgggtagctgggactacaggcgcctgccaccagcctggctaatttttttgtatttttagtagagacggggtttcaccgtgttgaccaggatggtctccatctccagacctcgtgatccgcccgcctcggactcccaaagtgctgggattacaggcatgagccaccgcgcccggtggcttgcatgttttcttaaaaagctacagaaatttccaaatatcttctttcagataatagttggtggagtggcaagtacatcacaagatatgcatacttatgctgcctgcacatttttggctgcaagtatgaaagaagggaagcaaggaattcagagaaatcaagagtctgttcagcttggagcgattgaggcctgtgtgatgtggctactagaaaatgaattcatccagagtacagaagccagtgatggaacagaaggtaagtgtgacttctcagttgcaatttactcactttttcttctttagtgagggtgtatgactgctcagtgaatggaaattgtcttttcatgtagtataaaaggaatttgattttttgagcagtgtatcaactcatttttagtaaatcagtattgtatttagcaacttcagaccattatgatagagcctgctcatacattttcatgctctggataaggtactatttgtaaaatttatcagccgggagggttagcatggaaaacagaaagatagtattttgttttattttattttgaatgtttgttcctctgtttcctcaccctaaccctaaaccaggaaaggtgtatcatccaacacatcttggttcggccactctttcttcttcactttctccagctgatactttagatatttttgctgacctgcaaagagcaatgaagggctttgttttagagaatgatcttcatattctctatctggtaagttctgttttaacaattatgtttgtgaaaatagggagaaaaaaatagatatataatcctgaacatcaaagataccctaacagaacatctcgtctgttttccatgcctaggttagtactggtgggaatagagaagaggtaagaagataattgttttaaagtaataatctaaatgttctagttacctttaaatttattttctccaacctcctttcaaaaaagatttgagttgttttataaaaaatatatatttttacaacgtataaaagaacagcaaagaaaaatgggatatcagaaaattaaagatcggatcatgatgtaaaactcaagcaaaggtcagtacacaaacatgcgtgccattaagtcatgtccaatgctgttgtcaactttgattctgggttttctagcaactaaaagaaagaggaaagcttgattagtgttaatattcataagataaaaaacaaaacaagtttaggaaaaacattgcatttccctgcctaagagaaatttagtcctaaaaggatactttggaacttaacattgtttgataaaaatctctataataaatgcaataaggaattttaaaagtttgtttatattagacaatgctctgtgaatattattttgtataacaaagatattaataagaattggatagtgtttaaggtcatgttctctggcaagaacctgatcagaaataattaattttgtcagttaagagcagatgcatgcattttgataagcaagtgataaggggaggtgagtaaaattgaaattctcattagaatgaagggggcttatcaggaaatgtgtttcaataaaaatcgctatgtagtgagcagaggggaaatgtctagacagtaccaattttcttttattacaaactcgcataatacatgggtgataataggctcaaaggtctgtgcccaagaatgtggctgggaggaatctcaaagcaggtttcaccggtcatctatcatggccttaaaaataagtcatttattatacagtggctaagattgtgggctctaggatcagactgccttagttcaacttttggcctcatcacttagtaatcatataaccttgggtaagtatttaacctctcttacgattccatttcctcatttgtaaaatggagataataatacccacctcagggctgatagtctttgatgaatgtttggtatctgaataaatgtttaataacatctattatttctagtaaattctcccataaacattatgtaagtcatttgccaaattacctaactactcctactcctgttccctctctaaaacgtgaagactgttggcagtgttagtatgctgaatgcttgtggttagtggtcttgtatacttctctcaccattcgagttgtatgcccttcaagagttagttgtgttcccaaacttgttcatgtcagtttgcttctgagaaaattaggctgaggcagaaggatcacctgagtccaggaatttgagaccagcatgggaaacagagcaagaatctgtcgctaccaaacaaaaaaaaaaaaaaaaaaa

SEQ ID NO: 198 - DNA, 1290 bp, Homo sapiens
  ZNF392; ZSCAN16; FLJ22191; dJ265C24.3
gagtctagtctttgttcggggctgtccaaaggacgctagctgttgcacctgttcctccctgcgcgtaagatagaggataaatctcctggcaaagcccagaatgaccacagccctggaacctgaggaccaaaaaggacttctgataattaaggcagaggaccattactggggacaggattccagctcacaaaagtgcagtcctcacaggagggaactctatagacaacacttcaggaagctctgctatcaggatgcacctggaccccgtgaagctcttacccagctgtgggagctctgccgtcagtggctgaggccagaatgccacaccaaggagcagattttagacctgctggtgctagaacagttcctgagcattcttcctaaagacctgcaagcatgggtgcgtgcacaccatccagagactggagaggaggcagtgacggtactggaggatctggagagagagcttgatgaacctggaaagcaggtcccaggcaattcagaaagacgggacatactcatggacaagttggcccccttgggaaggccatatgaatcactgactgtccagctccatcccaaaaagacccagctggagcaggaagctgggaaaccacaaaggaatggtgataaaactaggactaagaatgaagagttgttccagaaggaagatatgcccaaagacaaggaattccttggggagataaatgacagactgaacaaagatactcctcagcatcctaagtccaaagatattattgaaaatgagggcagatcagaatggcaacagagggaaagaagacgatataaatgtgatgaatgtgggaaaagtttcagtcatagctcagaccttagtaaacacaggagaactcacacgggagagaagccctataaatgtgatgagtgtggaaaagccttcattcagcgctcacatctcattggacatcatagagtacacacgggagtaaaaccctataaatgtaaagaatgtgggaaagacttcagtgggcgcacaggtcttattcagcatcagagaatccacacaggtgaaaaaccctatgaatgtgatgagtgtggaaggcctttccgagtaagttcagctcttattagacatcaaagaattcataccgcaaataaactctactaatatagcagtaatatcaaaagttctttggacactcaggcctaactagttatcaaagaatctattttagaaaccttgagtttcctcaatgtggtcaaagcttcagtcatcattaaacttctctggaccaaaaaaaaaaaaaaaaa

SEQ ID NO: 199 - DNA, 1550 bp, Homo sapiens
  HO-1; bK286B10
tcaacgcctgcctcccctcgagcgtcctcagcgcagccgccgcccgcggagccagcacgaacgagcccagcaccggccggatggagcgtccgcaacccgacagcatgccccaggatttgtcagaggccctgaaggaggccaccaaggaggtgcacacccaggcagagaatgctgagttcatgaggaactttcagaagggccaggtgacccgagacggcttcaagctggtgatggcctccctgtaccacatctatgtggccctggaggaggagattgagcgcaacaaggagagcccagtcttcgcccctgtctacttcccagaagagctgcaccgcaaggctgccctggagcaggacctggccttctggtacgggccccgctggcaggaggtcatcccctacacaccagccatgcagcgctatgtgaagcggctccacgaggtggggcgcacagagcccgagctgctggtggcccacgcctacacccgctacctgggtgacctgtctgggggccaggtgctcaaaaagattgcccagaaagccctggacctgcccagctctggcgagggcctggccttcttcaccttccccaacattgccagtgccaccaagttcaagcagctctaccgctcccgcatgaactccctggagatgactcccgcagtcaggcagagggtgatagaagaggccaagactgcgttcctgctcaacatccagctctttgaggagttgcaggagctgctgacccatgacaccaaggaccagagcccctcacgggcaccagggcttcgccagcgggccagcaacaaagtgcaagattctgcccccgtggagactcccagagggaagcccccactcaacacccgctcccaggctccgcttctccgatgggtccttacactcagctttctggtggcgacagttgctgtagggctttatgccatgtgaatgcaggcatgctggctcccagggccatgaactttgtccggtggaaggccttctttctagagagggaattctcttggctggcttccttaccgtgggcactgaaggctttcagggcctccagccctctcactgtgtccctctctctggaaaggaggaaggagcctatggcatcttccccaacgaaaagcacatccaggcaatggcctaaacttcagagggggcgaaggggtcagccctgcccttcagcatcctcagttcctgcagcagagcctggaagacaccctaatgtggcagctgtctcaaacctccaaaagccctgagtttcaagtatccttgttgacacggccatgaccactttccccgtgggccatggcaatttttacacaaacctgaaaagatgttgtgtcttgtgtttttgtcttatttttgttggagccactctgttcctggctcagcctcaaatgcagtatttttgttgtgttctgttgtttttatagcagggttggggtggtttttgagccatgcgtgggtggggagggaggtgtttaacggcactgtggccttggtctaacttttgtgtgaaataataaacaacattgtctg

SEQ ID NO: 200 - DNA, 2656 bp, Homo sapiens
  XB; TNX; XBS; HXBL; TENX; TNXB1; TNXB2; TNXBS
ggtctgtcaggcaggaaacgactgggccccatctctgctgacagcaccacagctcccctggagaaggagctacctccccacctgggggaactgaccgtggctgaggagacctccagctctctgcgcctgtcctggacggtagcccagggcccctttgactccttcgtggtccagtacagggacacggacgggcagcccagggcagtgcctgtggccgcagaccagcgcacagtcaccgtagaggacctggagcctggcaagaaatacaagtttctgctctacgggctccttgggggaaagcgcctgggcccggtctctgccctgggaatgacagccccagaagaggacacaccagccccagagttagccccagaggcccctgagcctcctgaagagccccgcctaggagtgctgaccgtgaccgacacaaccccagactccatgcgcctctcgtggagcgtggcccagggcccctttgattccttcgtggtccagtatgaggacacgaacgggcagccccaggccttgctcgtggacggcgaccagagcaagatcctcatctcaggcctggagcccagcaccccctacaggttcctcctctatggcctccatgaagggaagcgcctggggcccctctcagctgagggcaccacagggctggctcctgctggtcagacctcagaggagtcaaggccccgcctgtcccagctgtctgtgactgacgtgaccaccagttcactgaggctcaactgggaggccccaccgggggccttcgactccttcctgctccgctttggggttccatcaccaagcactctggagccgcatccgcgtccactgctgcagcgcgagctgatggtgccggggacgcggcactcggccgtgctccgggacctgcgttccgggactctgtacagcctgacactgtatgggctgcgaggaccccacaaggccgacagcatccagggaaccgcccgcaccctcagcccagttctggagagcccccgtgacctccaattcagtgaaatcagggagacctcagccaaggtcaactggatgcccccaccatcccgggcggacagcttcaaagtctcctaccagctggcggacggaggggagcctcagagtgtgcaggtggatggccaggcccggacccagaaactccaggggctgatcccaggcgctcgctatgaggtgaccgtggtctcggtccgaggctttgaggagagtgagcctctcacaggcttcctcaccacggttcctgacggtcccacacagttgcgtgcactgaacttgaccgagggattcgccgtgctgcactggaagcccccccagaatcctgtggacacctatgacgtccaggtcacagcccctggggccccgcctctgcaggcggagaccccaggcagcgcggtggactaccccctgcatgaccttgtcctccacaccaactacaccgccacagtgcgtggcctgcggggccccaacctcacttccccagccagcatcaccttcaccacagggctagaggcccctcgggacttggaggccaaggaagtgaccccccgcaccgccctgctcacttggactgagcccccagtccggcccgcaggctacctgctcagcttccacacccctggtggacagaaccaggagatcctgctcccaggagggatcacatctcaccagctccttggcctctttgggtccacctcctacaatgcacggctccaggccatgtggggccagagcctcctgccgcccgtgtccacctctttcaccacgggtgggctgcggatccccttccccagggactgcggggaggagatgcagaacggagccggtgcctccaggaccagcaccatcttcctcaacggcaaccgcgagcggcccctgaacgtgttttgcgacatggagactgatgggggcggctggctggtgttccagcgccgcatggatggacagacagacttctggagggactgggaggactatgcccatggttttgggaacatctctggagagttctggctgggcaatgaggccctgcacagcctgacacaggcaggtgactactccatccgcgtggacctgcgggctggggacgaggctgtgttcgcccagtacgactccttccacgtagactcggctgcggagtactaccgcctccacttggagggctaccacggcaccgcaggggactccatgagctaccacagcggcagtgtcttctctgcccgtgatcgggaccccaacagcttgctcatctcctgcgctgtctcctaccgaggggcctggtggtacaggaactgccactacgccaacctcaacgggctctacgggagcacagtggaccatcagggagtgagctggtaccactggaagggcttcgagttctcggtgcccttcacggaaatgaagctgagaccaagaaactttcgctccccagcggggggaggctgagctgctgcccacctctctcgcaccccagtatgactgccgagcactgaggggtcgccccgagagaagagccagggtccttcaccacccagccgctggaggaagccttctctgccagcgatctcgcagcactgtgtttacaggggggaggggaggggttcgtacaggagcaataaaggagaaactgaggtacccg

SEQ ID NO: 201 - DNA, 547 bp, Homo sapiens
  KRT14
ttttttttttttttttttttagaaaatgaaaacaagcatctttttccttatagcttgtatctcctttgagtactctgaaatggtaaccacatgacccactggggtttcttctctttgatagtctgattttatgaaacacaccagaaatacgctaaattttgagtttttctggaatcaaacttcaaaagctggagctggaatggaaaccctgcagtctttgtacacaccttcttccagtcatccctagatcatccctctttcatgaacctgacacatgcagtagctttacatcaatggccttgaggtttttcagtcctcttaatacttgataaaattagagaaatgctatataacaaaatatgtaagaatctatatgccaatttactcaccattatactgtcttataattctttaattaaacttagttacaaaaatgtatatatttaattaaataaaagaacctcaaagaccaataacagttattaagagtaacaagcagaaaatctctccatctgttttcagaagaaactgaaaaaaaaattatgag

SEQ ID NO: 202 - DNA, 4002 bp, Homo sapiens
  GF1; HGF; GGF1; GINGF
atgcaggcgcagcagctgccctacgagtttttcagcgaagagaacgcgcccaagtggcggggactactggtgcctgcgctgaaaaaggtccaggggcaagttcatcctactctcgagtctaatgatgatgctcttcagtatgttgaagaattaattttgcaattattaaatatgctatgccaagctcagccccgaagtgcttcagatgtagaggaacgtgttcaaaaaagtttccctcatccaattgataaatgggcaatagctgatgcccaatcagctattgaaaagaggaagcgaagaaaccctttatctctcccagtagaaaaaattcatcctttattaaaggaggtcctaggttataaaattgaccaccaggtttctgtttacatagtagcagtcttagaatacatttctgcagacattttaaagctggttgggaattatgtaagaaatatacggcattatgaaattacaaaacaagatattaaagtggcaatgtgtgctgacaaggtattgatggatatgtttcatcaagatgtagaagatattaatatattatctttaactgacgaagagccttccacctcaggagaacaaacttactatgatttggtaaaagcatttatggcagaaattcgacaatatataagggaactaaatctaattataaaagtttttagagagccctttgtctccaattcaaaattgttttcagctaatgatgtagaaaatatatttagtcgcatagtagatatacatgaacttagtgtaaagttactgggccatatagaagatacagtagaaatgacagatgaaggcagtccccatccactagtaggaagctgctttgaagacttagcagaggaactggcatttgatccatatgaatcgtatgctcgagatattttgcgacctggttttcatgatcgtttccttagtcagttatcaaagcctggggcagcactttatttgcagtcaataggcgaaggtttcaaagaagctgttcaatatgttttacccaggctgcttctggcccctgtttaccactgtctccattactttgaacttttgaagcagttagaagaaaaaagtgaagatcaagaagacaaggaatgtttaaaacaagcaataacagctttgcttaatgttcagagtggtatggaaaaaatatgttctaaaagtcttgcaaaacgaagactgagtgaatctgcatgtcggttttatagtcagcaaatgaaggggaaacaactagcaatcaagaagatgaacgagattcagaagaatattgatggttgggagggaaaagacattggacagtgttgtaatgaatttataatggaaggaactcttacacgtgtaggagccaaacatgagagacacatatttctctttgatggcttaatgatttgctgtaaatcaaatcatgggcagccaagacttcctggtgctagcaatgcagaatatcgtcttaaagaaaagttttttatgcgaaaggtacaaattaatgataaagatgacaccaatgaatacaagcatgcttttgaaataattttaaaagatgaaaatagtgttatattttctgccaagtcagctgaagagaaaaacaattggatggcagcattgatatctttacagtaccggagtacactggaaaggatgcttgatgtaacaatgctacaggaagagaaagaggagcagatgaggctgcctagtgctgatgtttatagatttgcagagcctgactctgaagagaatattatatttgaagagaacatgcagcccaaggctggaattccaattatcaaagcaggaactgttattaaacttatagagaggcttacgtaccatatgtacgcagatcccaattttgttcggacatttcttacaacatacagatccttttgcaaacctcaagaactactgagtcttataatagaaaggtttgaaattccagagcctgagccaacagaagctgatcgcatagctatagagaatggagatcaacccttgagtgcagaactgaaaagatttagaaaagaatatatacagcctgtgcaactgcgagtattaaatgtatgtcggcactgggtagagcaccacttctatgattttgaaagagatgcatatcttttgcaacgaatggaagaatttattggaacagtaagaggtaaagcaatgaaaaaatgggttgaatccatcactaaaataatccaaaggaaaaaaattgcaagagacaatggaccaggtcataatattacatttcagagttcacctcccacagttgagtggcatataagcagacctgggcacatagagacttttgacctgctcaccttacacccaatagaaattgctcgacaactcactttacttgaatcagatctataccgagctgtacagccatcagaattagttggaagtgtgtggacaaaagaagacaaagaaattaactctcctaatcttctgaaaatgattcgacataccaccaacctcactctgtggtttgagaaatgtattgtagaaactgaaaatttagaagaaagagtagctgtggtgagtcgaattattgagattctacaagtctttcaagagttgaacaactttaatggtgtccttgaggttgtcagtgctatgaattcatcacctgtttacagactagaccacacatttgagcaaataccaagtcgccagaagaaaattttagaagaagctcatgaattgagtgaagatcactataagaaatatttggcaaaactcaggtctattaatccaccatgtgtgcctttctttggaatttatctcactaatatcttgaaaacagaagaaggcaaccctgaggtcctaaaaagacatggaaaagagcttataaactttagcaaaaggaggaaagtagcagaaataacaggagagatccagcagtaccaaaatcagccttactgtttacgagtagaatcagatatcaaaaggttctttgaaaacttgaatccgatgggaaatagcatggagaaggaatttacagattatcttttcaacaaatccctagaaatagaaccacgaaaccctaagcctctcccaagatttccaaaaaaatatagctatcccctaaaatctcctggtgttcgtccatcaaacccaagaccaggtaccatgaggcatcccacacctctgcagcaggagccaaggaaaattagttatagtaggatccctgaaagtgaaacagaaagtacagcatctgcaccaaattctccaagaacaccgttaacacctccgcctgcttctggtgcttccagtaccacagatgtttgcagtgtatttgattccgatcattcgagcccttttcactcaagcaatgataccgtctttatccaagttactctgccccatggcccaagatctgcttctgtatcatctataagtttaaccaaaggcactgatgaagtgcctgtccctcctcctgttcctccacgaagacgaccagaatctgccccagcagaatcttcaccatctaagattatgtctaagcatttggacagtcccccagccattcctcctaggcaacccacatcaaaagcctattcaccacgatattcaatatcagaccggacctctatctcagaccctcctgaaagccctcccttattaccaccacgagaacctgtgaggacacctgatgttttctcaagctcaccactacatctccaacctccccctttgggcaaaaaaagtgaccatggcaatgccttcttcccaaacagcccttccccctttacaccacctcctcctcaaacaccttctcctcacggcacaagaaggcatctgccatcaccaccattgacacaagaagtggaccttcattccattgctgggccgcctgttcctccacgacaaagcacttctcaacatatccctaaactccctccaaaaacttacaaaagggagcacacacacccatccatgcacagagatggaccaccactgttggagaatgcccattcttcctga

SEQ ID NO: 203 - DNA, 1071 bp, Homo sapiens
gtccatcttgctgctgtccactttgggttccatcttgggctccatcttgctctcacgattaaaagcttctttcctgctttccccattccgaccatcatttgcaccccggttctccccatgccggcctgcgcttcctccatgtctgttctccccgtgccgatggccatcagtatgacggctgctgctttctggatggcggtatccatctccatggcgaccaccatctccgtgacgtggactatcgctatgccgattgccagtctctccgtgactgtgacggctgctgccccggttctcagtatatctctctcttttcccgttgctgcccccagtcccttctcggctgttattccctgaagctgtgttgttgactccttgggctccggcagacgggtaggtcacaggggcaccactgatgttgccagtattgccaaagcctgggatgcccttggcggcactggtgacggggctgtcaggactgttatggccctgttgtgctgagttagttggaacagaattcaagctccctgcactagtccacctgccccactgcttcttcgcttctctcttggaaagtccagtctctcctcggcttgcaatggaccccaactgctcctgcgccgctggtgtctcctgcacctgcgctggttcctgcaagtgcaaagagtgcaaatgcacctcctgcaagaagagctgctgctcctgctgccccgtgggctgtagcaagtgtgcccagggctgtgtttgcaaaggggcgtcagagaagtgcagctgctgcgactgatgccaggacaacctttctcccagatgtaaacagagagacatgtacaaacctggattttttttttataccaccttgacccatttgctacattccttttcctgtgaaatatgtgagtgataattaaacactttagacctgaaaaaaaaaaaaaaaaaaaaaaaaaaaaaaaaaaaaaaaaaaaaaaaaaaaaaaaaaaaaaaaaaaaaaaaaaaaaaaaaaaaaaaaaaaaaaaaaaaaaaaaaaaaaaaaaaaaaaaaaaaaaaaaaaaaaaaaaaaaaaaaaaaaaa

SEQ ID NO: 204 - DNA, 1122 bp, Homo sapiens
  HSU52521; MGC117369
atggctcaagaatctcccaaaaattcagcagcagaaattccagtgactagtaatggagaagttgatgactctcgtgaacatagctttaatagggatttgaagcattcattaccatctggacttggtctctcagaaacccaaattacatctcatggctttgacaataccaaagagggtgttattgaagcaggagcatttcaaggttccccagcaccgccactgccatctgttatgtctcctagcagggttgcagctagtcgactggctcagcaaggaagtgatttaattgttcctgcaggtggccagagaacacagacaaaaagtggaccagttattctagcagatgaaattaaaaatcctgcaatggaaaagttagaacttgttagaaaatggagtctaaacacctataagtgtactcgacagattatctctgagaagctaggccgtggctcaagaactgtggaccttgaacttgaagctcagattgatatattaagggataacaagaaaaaatatgaaaatattttaaaactggctcaaacattgtcgacccagcttttccagatggtacatacccaaaggcaacttggagatgcatttgctgacctgagtttgaagtcactagaacttcatgaagaatttggctataatgccgatacccagaaactgctggctaaaaatggagagactcttcttggggccattaattttttcattgcyagtgtgaacactttggtgaataaaaccattgaagatacattaatgactgtgaaacagtatgaaagtgccaggattgaatatgatgcatatcgcactgatttggaagaactgaatcttggaccacgtgacgcaaacactctgccaaagattgagcagtcacagcatctcttccaagcacataaggaaaaatatgataaaatgcgcaatgatgtttctgtcaaattgaaatttctagaagaaaataaggttaaagtattgcacaatcagctggtccttttccacaatgccattgccgcttactttgctgggaatcagaagcagcttgaacagacacttaaacagttccatatcaaattgaaaacccctggagtggatgccccatcttggcttgaagaacagtaa

SEQ ID NO: 205 - DNA, 501 bp, Homo sapiens
  RPL28
tacaagcattataagcagtattttatactttgagattttgtacactttacacaatgcaaaatgagaaaaatatgaacacgtataaaattacacacaaataatgtatctacaaaggattaaattacagaacgaaagcccccatcgttgggcagatagatgccagagtttcaagcttctgtcaaatagaactctttgtatctatctctttaaccataagtggcattttgtaacaatacccttgagaggtagtatcaagataataatattcttaccagtaaacaacacagaataaaacttttgttggtctgactcttggagcctcaatcagtttaggttcttggaaactggatttacttagtcttccctataaaatctctgactgccaatgcttgattgacatgagctcaaaagttactgatgctattttaaatgataaatttaggacaaaatgctttttactcctaagcctcaatttagaggtagaaagttattttattttct

SEQ ID NO: 206 - DNA, 5059 bp, Homo sapiens
  DACAR; NDPP1; TUCAN; CARDINAL; KIAA0955; MGC57162
ctggttctcaacttcttttgaaataatgttcatagagaaggagggctgtctgagattcgagggaaacaagctctcaggacttccggtcgccatgatggctgtgggcggtaaacgcggttagtgcaagcatctgggccatcttcaatggtaaaaaagatacagtaaagacataaataccacatttgacaaatggaaaaaaaggagtgtccagaaaagagtagcagcagtgaggaagagctgccgagacgggtatacagggagctaccctgtgtttctgagaccctttgtgacatctcacattttttccaagaagatgatgagacagaggcagagccattattgttccgtgctgttcctgagtgtcaactatctgggggggacattcccaggagacatttgctcagaagagaatcaaatagtttcctcttatgcttctaaagtctgttttgagatcgaagaagattataaaaatcgtcagtttctggggcctgaaggaaatgtggatgttgagttgattgataagagcacaaacagatacagcgtttggttccccactgctggctggtatctgtggtcagccacaggcctcggcttcctggtaagggatgaggtcacagtgacgattgcgtttggttcctggagtcagcacctggccctggacctgcagcaccatgaacagtggctggtgggcggccccttgtttgatgtcactgcagagccagaggaggctgtcgccgaaatccacctcccccacttcatctccctccaaggtgaggtggacgtctcctggtttctcgttgcccattttaagaatgaagggatggtcctggagcatccagcccgggtggagcctttctatgctgtcctggaaagccccagcttctctctgatgggcatcctgctgcggatcgccagtgggactcgcctctccatccccatcacttccaacacattgatctattatcacccccaccccgaagatattaagttccacttgtaccttgtccccagcgacgccttgctaacaaaggcgatagatgatgaggaagatcgcttccatggtgtgcgcctgcagacttcgcccccaatggaacccctgaactttggttccagttatattgtgtctaattctgctaacctgaaagtaatgcccaaggagttgaaattgtcctacaggagccctggagaaattcagcacttctcaaaattctatgctgggcagatgaaggaacccattcaacttgagattactgaaaaaagacatgggactttggtgtgggatactgaggtgaagccagtggatctccagcttgtagctgcatcagcccctcctcctttctcaggtgcagcctttgtgaaggagaaccaccggcaactccaagccaggatgggggacctgaaaggggtgctcgatgatctccaggacaatgaggttcttactgagaatgagaaggagctggtggagcaggaaaagacacggcagagcaagaatgaggccttgctgagcatggtggagaagaaaggggacctggccctggacgtgctcttcagaagcattagtgaaagggacccttacctcgtgtcctatcttagacagcagaatttgtaaaatgagtcagttaggtagtctggaagagagaatccagcgttctcattggaaatggataaacagaaatgtgatcattgatttcagtgttcaagacagaagaagactgggtaacatctatcacacaggctttcaggacagacttgtaacctggcatgtacctattgactgtatcctcatgcattttcctcaagaatgtctgaagaaggtagtaatattccttttaaattttttccaaccattgcttgatatatcactattttatccattgacatgattcttgaagacccaggataaaggacatccggataggtgtgtttatgaaggatggggcctggaaaggcaacttttcctgattaatgtgaaaaataattcctatggacactccgtttgaagtatcaccttctcataactaaaagcagaaaagctaacaaaagcttctcagctgaggacactcaaggcatacatgatgacagtcttttttttttttgtatgttaggactttaacactttatctatggctactgttattagaacaatgtaaatgtatttgctgaaagagagcacaaaaatgggagaaaatgcaaacatgagcagaaaatattttcccactggtgtgtagcctgctacaaggagttgttgggttaaatgttcatggtcaactccaaggaatactgagatgaaatgtggtaaatcaactccacagaaccaccaaaaagaaaatgagggtaattcagcttattctgagacagacattcctggcaatgtaccatacaaaaaataagccaactctgacatttggattctaccatagactctgtcattttgtagccatttcagctgtcttttgattaatgttttcgtggcacacatatttccatccttttatgtttaatctgtttaaaacaagttcctagtagacaccatctggttgagtcagttttttttatggtgtattttgaacccattctgatagtctcttttaactggaagatttcaattacttacgttaatgtaattattaatatgttaggatttatcctcagtcagccagtttgttatgtcttttctattctactgttatcacatttgtaccacttaaagtggaatctaggcactttatcaccatttagatcctattaccttttctcatctaggatatagttatcttctacataatctttctgtatcttaaaacccatcaataaattattatatattttctacttttaatcactcagaagatttaaaaaactcatgagaagagtaatctgttatgtttttccagatatttaccatttctgttgctcttccttcattattttccaaatttcgttctgcaaatttccacttcttctgatagacgttttttagttcttttagagtggttctgataggtacagattctcttattttttgcttcctctgaggacatctttttctcaccttcattctcagtgatgttttttgcttgtagtatttttagttgacattgttttctgttcagcagtttccttttagcttccgtatttcctgatgagaaatctgcagtcattcaaattgttgtttccctgtatgtagtgtgtcatttttctgtcagatttcaaggtatttatctttagtttttagccatttcattatgttggggatgagtttccttgttttattccctttggaatttgctccaattcataaatttgcagttttatgtcttttaccaaacttagaggttttcagcctaatttctaaaaatactttttattagcctgattttcatctttataggaaatagtttaagtgatgacaagttccaatagcttatatgcccagaaggccttcaaaataagaattttgaaagaatacagaaaacaaacttttatatccttctcatgtcttctactgtaaaattcatatgctttgctactctaaacctagtttgaaatcaacagtcttgagaatagatgaaaattttgatgaatagtggaattcttttaaatggaaacctcttacatgtgattttccttgccatctagaaataaaccatagtatttatgttgaatcaatcaatattatattttgtttttttcctcctcttctgagactcttattgtggaaatgttagacttttatgttttcctaaatgtccctgatattctacttatttagaacatcttttcattttttccattattctgattgggtaattttaatttgtctattttcaaatttgctggagtgttcacctgttgttgtctgtgtcgtcccactgagtgcattcaccaccttttaaattttggtcactgtatgtatcagttctaaaatttccattttgttctctatattttaaatttcttggcttatattctattttcctgcaaatgtgtcagcatttgcttgtttgagctttttttttttcaagacagggtctcaactctgttacccaggctggagtgcagtggtgcgatctcagctcactgcaacctctgcctcctggttcaagcgattattgtgcctcagcctcctgagtagctgggattacaggcatgcaccaccacagcccagctaattttttgtatttttagtagagacagagttttgctatgttggccaggctggttttgaactcctggcctcaagtgatccacccacctcagcctcccaaagtgctgggattacaggccactacacctggcacatttgagtattttttttttttttttttttttgagatggagtctcgctctgtcatctaggctggagtgcagtggtgtgatctcagctcactgcagcctctgtctcccgggctcaagcgattctcttgcctcagcctcctgagtagctaggactacaggtgcatgccaacacgcccggctaatttttttaaaaaatatttttagtagagacagggtttcaccattttggccaggatggtctcgatctcctgacctcatgatccacccgcctcggccttccaaagtgctgggattacaggcatgagccaccgtgcctggcctcatttgagtatttttataatgtctcttttaaagtctttgtcagataattccactgtacatgttattcagtgtttggtgtccactgagttgtcatttgccagacaagtggagatttttgcagctcatccttgtattctcagtagttccgatatgtaccctcgacatgtgaatgttatcttatgagactctgttttatttgtatccaacagaagatgtttattatttatttggctttctgtgaactgaggtcttaatatcagctcattttaaaagtctttgcagtggtattcggatctatcctgtgtgtgcctatgagattgggtgcagtgtatcctgttagctccattctcagggcgtttgaatgtgaattaggaccagcgcaatgaatgctcaagttggggttgggcgttagaattcataaaagtctttatatgctcag

SEQ ID NO: 207 - DNA, 1734 bp, Homo sapiens
  CECR5
ctggtggaccagctggctcctaaagaggagaggggactaaatcatgtatgcttggttctttcttcccagcttctctcagagcccacccacctttgggttcctgttggacatcgatggagtgcttgtgcggggccacagagtgatccctgctgctctgaaagccttccgaaggctggtgaactcccaggggcagctgcgggtgcccgtggtttttgttacaaatgctgggaacatcttacaacacagcaaagcccaggagctgtcagccctgctggggtgcgaggtggatgcagaccaagttatcctctctcacagccccatgaagctcttctccgagtaccatgagaagcggatgctggtgtctggacaggggcccgtgatggaaaatgcccagggactgggcttccgaaatgtcgtcaccgtggatgagctgcggatggcctttcctctgcttgacatggtggacctggagcggcggctaaagaccacgcccctcccgaggaatgacttcccccgcattgaaggggtgctcctcctaggggagccggtccgctgggagaccagcctgcagctgatcatggatgtcctcctcagcaatgggagccctggggctggcctggcaacacccccctacccccacctccccgtcctagccagcaacatggatctcctgtggatggctgaagccaagatgcccaggtttggacatggcacctttctgctgtgcctggaaaccatttaccagaaagtgacgggcaaggagctgagatacgagggcctgatgggcaaacccagcatcctcacttaccagtatgccgaggacctgatcaggcgacaggcggagaggcggggctgggccgcccccatccggaagctctatgctgtgggtgataaccctatgtctgacgtatacggcgccaacctgttccaccagtacctgcagaaggcaacgcatgatggggcgccagaactaggggccgggggcacacggcagcaacagccctcagcaagccagagctgcatctccatcctggtgtgtacaggcgtctacaatcccaggaacccacagtccacggagcctgtccttggaggaggggagcctccattccacgggcaccgagacttatgcttcagtccagggctcatggaggcctcccacgtggtgaatgacgtgaatgaggctgtgcagctggtcttccgcaaggagggctgggctttggagtgagggcagtgcggtggaggtgagggggtgagcctggacctgtgggcgagtcccattggctgggctctggcctgatcactgggctcaggtcagggcttggttcccttgccacccttcttgctgccccatgagtgtggcattactggtcacttggaagaagacagtgactctttttccctgctgggtagcattttgtatggaacggttggaattttctgggcccagttcccacgtgcctttcgtggcagtctaacctcaggccattctcttcccctgtgtgcctcagtgtccttctcatttcagtagggacttctgaaatgggggaggcagtgtggaatactgtggatgtctgtgcagagcctttgccggcactgaaggcatgcagcctgtcggcagagtgtcttaacaccagatgctactttttactgtattgtagtttattgcccggagatgtggggctttttttttaaataaaataatcataataaatgttcatgatgctgaaaaaaaaa

SEQ ID NO: 208 - DNA, 3850 bp, Homo sapiens
  FLJ12796
ctcgtggaggctgagattgcttcacctgtggtatcagacatcacaacatggggctcaccaagcagtacctacgctatgttgctagtgcggtctttggcgttatcggcagccaaaaaggtaatattgtctttgtgacacttcgtggtgagaaaggacgttatgtggcagtaccagcttgtgaacacgttttcatctgggacttaaggaaaggagagaagattcttatccttcaggggcttaaacaagaagttacttgcttatgcccctccccagatgggctacacttagctgttgggtatgaggatgggtcgatccgaatcttcagtctcctgagtggggaaggaaatgtgaccttcaatggtcacaaagcagctatcactaccttgaagtatgatcagctaggaggcagactggcatctgggtccaaggacacagatattattgtatgggatgtgatcaatgaaagtggtctgtaccgtctaaaggggcacaaggatgccatcacacaagcattgtttctacgagaaaagaacctgctagttactagtgggaaagataccatggtgaaatggtgggaccttgatactcagcactgctttaaaacaatggttggccaccggactgaggtatgggggttggttctgttgtcagaagaaaagcgactcatcactggggcctcagacagtgaactgagggtatgggacatagcttatctgcaagagattgaagacccggaagaaccagaccccaagaaaatcaaaggatcttctcctggaatacaagatactcttgaggcagaggatggtgcctttgagacggatgaagcccctgaggatcgaatcctttcatgcagaaaagctggttccataatgcgggaaggaagagacagagttgtaaaccttgcagtcgacaagacaggcaggattcttgcttgccatggaactgactctgtgctagaattgttttgtatcctttccaaaaaggaaattcagaagaaaatggataagaagatgaagaaagctagaaagaaagcaaaattacattctagcaaaggagaggaggaagatcctgaggttaatgttgaaatgagtctgcaagatgaaatccagcgggtgactaatataaaaacttctgccaaaatcaagtcctttgacttgattcattcacctcacggagagttaaaggctgtcttcctgctgcagaacaacctggtggaattgtattcactgaatccatccttgcctactcctcagcctgtcaggacaagcagaatcactattgggggtcatcgcagtgatgtgcggactttgtcattcagctcagacaatattgctgttctttcagctgcagctgattccattaaaatatggaacaggtctacactgcagtgtattcgcacaatgacctgtgaatatgcactttgctcattctttgtacctggtgatagacaggtagtcataggaacaaagacagggaagctgcagctttatgacttggcttcagggaatctgctggagacaatagatgcacatgatggagctttatggtccatgtccctctctccagatcagcgtggctttgtgacaggtggtgcagataaatctgtcaaattctgggattttgagttagtgaaagatgaaaatagtacccaaaagagactttctgtgaagcaaacccgaactttgcaactagatgaagatgttctgtgtgtcagttactctcccaatcaaaagctattggctgtgtctttgctggactgtactgtgaaaattttctacgttgatactttaaagttttttctgtcactgtatggacacaaactgcctgttatatgcatggacatctctcatgatggagcactcatagcaactggctccgctgataggaatgtgaaaatctggggtttggactttggggactgccacaagtctctctttgcacatgatgacagtgtgatgtacctacagtttgtacccaagtctcacctcttcttcactgccggaaaagatcataagattaaacagtgggatgcagacaaatttgaacacatacagactctggagggtcatcaccaggaaatatggtgtttggctgtaagccccagtggagactatgttgtatcatcgtcccatgacaaatctctgagactttgggagagaacaagggagcctcttattcttgaggaagaaagggagatggaaagagaagcagaatatgaggagagtgtggccaaagaagaccaaccagcagttccaggagagactcaaggtgacagttactttactggaaagaaaactattgaaacagtgaaagcagctgagaggattatggaggctattgagttgtaccgagaagaaactgcaaaaatgaaggaacacaaagccatttgtaaagctgcagggaaagaggttccacttcccagcaaccccatcctaatggcttatggcagtatctcaccttcagcttatgtattagagatttttaaagggatcaagtcgagtgagctggaagaatctctacttgtgctgcctttctcttatgtcccagacattcttaaactctttaacgaattcattcagctgggctctgatgttgaacttatatgccggtgcctcttcttcctccttaggattcactttggacagatcactagcaatcaaatgcttgtgccagtgatagaaaaattaagggaaacaactatttcaaaagtcagccaagtccgggatgttatcggcttcaatatggctggtcttgattatctcaagagggaatgcgaggcaaaaagtgaagttatgttttttgctgatgctactagccacttggaagagaagaagaggaagaggaaaaagagggagaagttgattctaacgttgacttagaactgaaatgtggtatcttttttttttcaactttttcctttaaaggactcctaaactaagcacagaagagttggcgtcatcttaaaaataccaaataacagaagatcgcattgcagatgatatcaggatgtggtttccagctttgcctgatggaattccaacatgagattatgggctgggctccatttcttggacttaaaatgcattattagtttaaaaactttctgtgctctcaaagcttgagccttgcagctcaagcttgttgttccctttatattctagcagggaataaataattgttttaattaggtatttgtttcattggagttgaaattaacatttcaaaagtttttcgtatttttttatggcagatgatttgtcatttatttatattaggttttactgcctattgagacaaccaggtgcataattgattgccctttggccataaaaatgcagtgtcatggatcttagagctaaaaaggactgtaaaaattacccagaacagcgtcctcagacttaaccttctgcaagttatgtctgtatataagaagattctaattgctaactgtttatacttttctgaataaaatagttgtttctaattaaaaagtagccaagctaagatgcctggctgggcttctgaggaattaatacacttcgtgtgtgtgtgtgtgtgtgtgtgtgtgtgtgtgtgtatgtgtatgtacacatacatatatatagttgacacttgaaaaatgcaggtggtaggggcactgacccacccctacgccccgcacagtcaaaaatctgcatataacttttgattccccaaagtcttaagtactagtagcctgttattgactgggagcctgactgatgtattatatatattgtatactgtattcttaaagtaagctagagaaaagaaaatgttacttagaaaatcataaggaagagaaaatatatttactgtgtttatcaatact

SEQ ID NO: 209 - DNA, 901 bp, Homo sapiens
  MAN1A1
tgtgaatagacaagaagctgtactatatgtgctctctcagtggcaacaatgaagttttgcaattctagaacttggattttttttttaacaaaagtcccaaaacaccaaaaatgtaaacaagataagagattaatattgtagtgatgtaatttaattaaagttatattttgggttaattttaacaactgaagtcttattgttgaaacttattttcaacaaaactgtgcagttaaatttgtatacgtattcacatactgaaagatgaaccgttaaaatagcacttaatttgtgtttcttcaatatgtcttgatatactttgtgcaattaatattacacatgtaagttgtatggcagtttacagaactcaatgacttgtcatgaggttttcatatgagctacacattgtgtacattgatggttttttatttttacataaatccattctgtcattttcaactttatatataaatctccaatgttatgggaaacaatagattgacacataatttttaaaaattatattgtaaaatttctctatggtgaataaagtcttttaatataaaaaaaaaaaaaaaaaaaagaaacaaaaaaagaaaaaaaaaaaaaaaaaaaaaaaaaaaagggggggggggaaaaaaaaaccacggggggcacaaatctatccgccacccacgtttagatcaaaggggccccaagagagagacaaaagaaagcgacggcgacacaacaaccgggggcacacgcgtacgactagggagagcacaatcgcggtagtaggacacacacaaaaaacgagaacaaacaggaccgtgacaccacctgcgattgcctaataaaaaggcagaaacggcacgcacagcgacgagcacgcagcagaaacaccacacgcagcaccatgtac

SEQ ID NO: 210 - DNA, 578 bp, Homo sapiens
  TNXB
tacctcagtttctcctttattgctcccgtacgaacccctcccctcccccctgtaaacacagtgctgcgagatcgctggcagagaaggcttcctccagcggctgggtggtgaaggaccctggctcttctctcggggcgacccctcagtgctcggcagtcatactggggtgcgagagaggtgggcagcagctcagcctccccccgctggggagcgaaagtttcttggtctcagcttcatttccgtgaagggcaccgagaactcgaagcccttccagtggtaccagctcactccctgatggtccactgtgctcccgtagagcccgttgaggttggcgtagtggcagttcctgtaccaccaggcccctcggtaggagacagcgcaggagatgagcaagctgttggggtcccgatcacgggcagagaagacactgccgctgtggtagctcatggagtcccctgcggtgccgtggtagccctccaagtggaggcggtagtactccgcagccgagtctacgtggaaagagtcgtactgggcgaacacagcctcgttcccagcccgcaggtccacgcgcatggagt

SEQ ID NO: 211 - DNA, 2015 bp, Homo sapiens
  HVH1; CL100; MKP-1; PTPN10
tcgctgcgaaggacatttgggctgtgtgtgcgacgcgggtcggaggggcagtcgggggaaccgcgaagaagccgaggagcccggagccccgcgtgacgctcctctctcagtccaaaagcggcttttggttcggcgcagagagacccgggggtctagcttttcctcgaaaagcgccgccctgcccttggccccgagaacagacaaagagcaccgcagggccgatcacgctgggggcgctgaggccggccatggtcatggaagtgggcaccctggacgctggaggcctgcgggcgctgctgggggagcgagcggcgcaatgcctgctgctggactgccgctccttcttcgctttcaacgccggccacatcgccggctctgtcaacgtgcgcttcagcaccatcgtgcggcgccgggccaagggcgccatgggcctggagcacatcgtgcccaacgccgagctccgcggccgcctgctggccggcgcctaccacgccgtggtgttgctggacgagcgcagcgccgccctggacggcgccaagcgcgacggcaccctggccctggcggccggcgcgctctgccgcgaggcgcgcgccgcgcaagtcttcttcctcaaaggaggatacgaagcgttttcggcttcctgcccggagctgtgcagcaaacagtcgacccccatggggctcagccttcccctgagtactagcgtccctgacagcgcggaatctgggtgcagttcctgcagtaccccactctacgatcagggtggcccggtggaaatcctgccctttctgtacctgggcagtgcgtatcacgcttcccgcaaggacatgctggatgccttgggcataactgccttgatcaacgtctcagccaattgtcccaaccattttgagggtcactaccagtacaagagcatccctgtggaggacaaccacaaggcagacatcagctcctggttcaacgaggccattgacttcatagactccatcaagaatgctggaggaagggtgtttgtccactgccaggcaggcatttcccggtcagccaccatctgccttgcttaccttatgaggactaatcgagtcaagctggacgaggcctttgagtttgtgaagcagaggcgaagcatcatctctcccaacttcagcttcatgggccagctgctgcagtttgagtcccaggtgctggctccgcactgttcggcagaggctgggagccccgccatggctgtgctcgaccgaggcacctccaccaccaccgtgttcaacttccccgtctccatccctgtccactccacgaacagtgcgctgagctaccttcagagccccattacgacctctcccagctgctgaaaggccacgggaggtgaggctcttcacatcccattgggactccatgctccttgagaggagaaatgcaataactctgggaggggctcgagagggctggtccttatttatttaacttcacccgagttcctctgggtttctaagcagttatggtgatgacttagcgtcaagacatttgctgaactcagcacattcgggaccaatatatagtgggtacatcaagtccatctgacaaaatggggcagaagagaaaggactcagtgtgtgatccggtttctttttgctcgcccctgttttttgtagaatctcttcatgcttgacatacctaccagtattattcccgacgacacatatacatatgagaatataccttatttatttttgtgtaggtgtctgccttcacaaatgtcattgtctactcctagaagaaccaaatacctcaatttttgtttttgagtactgtactatcctgtaaatatatcttaagcaggtttgttttcagcactgatggaaaataccagtgttgggtttttttttagttgccaacagttgtatgtttgctgattatttatgacctgaaataatatatttcttcttctaagaagacattttgttacataaggatgacttttttatacaatggaataaattatggcatttctattg

SEQ ID NO: 212 - DNA, 771 bp, Homo sapiens
  WNK1
  modified_base (183)..(183): a, c, t or g
  modified_base (511)..(511): a, c, t or g
  modified_base (582)..(582): a, c, t or g
cctaattgctaatgctgcagtcaaagctgctaatatcttttgcttaaagcactaatgacctatcataagaaagagttgcaccccagtaccctggtatttttcactgggttctaaagagcaaagaaaaaataaaaaagagaggggtaaaaaaaagggaggagggcagggtaggagagagcccantaggtggtttttgtcctgtggttcggattcttgagggagtgagggattcagggcatgtaccaaaagcaagagctccacccactcgaaattacagatgggtttgattttacattgagttctccagcttccttatgaacaagactttcctagccctcatcctcattactgagtatagataaacaggaaagcatggtctgaagctgccccttgacaaaaaagctgttctttccttcctctcccattccaataactgggagcggggagactctccattctgagggctcaatgcagtattaaaaacattcccctctggcaagaaataaccagntaaatgcagcactagtagttagtatataggggggttttcaccccccacccaccccctcagcatttcatctnctgcccccagatccattcaggtaatgtctctaggtctagtggtcccgaggttggagccctggggttgctgatggattctgcaaattgctgatgttgaattctgcagggagcagttccacaagttggaactgccaaattggtgtgtgctggggcacccgtccactccattgtcgcaaaatgggaactgaa

SEQ ID NO: 213 - DNA, 1637 bp, Homo sapiens
  IRC1; IRC2; IRp60; IGSF12; CMRF35H; CMRF-35H; CMRF35H9; CMRF-35-H9
  modified_base (1315)..(1315): a, c, t or g
  modified_base (1498)..(1499): a, c, t or g
cgggggaggcgtgactttcccctcgggtccaggtagggcctggagctgctgcaagtgccgcctgtgctggggaagggaccatgtggctgccttgggctctgttgcttctctgggtcccaggatgttttgctctgagcaaatgcaggaccgtggcgggcccgtggggatccctgagtgtgcagtgtccctatgagaaggaacacaggaccctcaacaaatactggtgcagaccaccacagattttcctatgtgacaagattgtggagaccaaagggtcagcaggaaaaaggaacggccgagtgtccatcagggacagtcctgcaaacctcagcttcacagtgaccctggagaatctcacagaggaggatgcaggcacctactggtgtggggtggatacaccatggctccgagactttcatgatcccgttgtcgaggttgaggtgtccgtgttcccggcatcaacgtcaatgacacctgcaagtatcactgcggccaagacctcaacaatcacaactgcatttccacctgtatcatccactaccctgtttgcagtgggtgccacccacagtgccagcatccaggaggaaactgaggaggtggtgaactcacagctcccgctgctcctctccctgctggcattgttgctgcttctgttggtgggggcctccctgctagcctggaggatgtttcagaaatggatcaaatggatcaaagctggtgaccattcagagctgtcccagaaccccaagcaggctgccacgcagagtgagctgcactacgcaaatctggagctgctgatgtggcctctgcaggaaaagccagcaccaccaagggaggtggaggtggaatacagcactgtggcctcccccagggaagaacttcactatgcctcggtggtgtttgattctaacaccaacaggatagctgctcagaggcctcgggaggaggaaccagattcagattacagtgtgataaggaagacataggtcctgcctcgccatcggagctctcatgggccccaggaagtcagggacagctcccttatacctggcccacgtccttctcagcctgccctcgacaacagtgaccaacagacaggcagctgggtttccaggccatccctctgttgccatcagcttgattggcttccccgagggccagcagggctggggctccggagagcagcaggaagcactcccagccaccagtgcctgtcacctctttcccctttgcccctgcttcatcccagctctgtgtgtggaggacaaagcttcttcctgcgtggctccaggaaaagatgtggctcacgtaggtngcacctgccaatagctttgtcaatcacagccccataggaacgtctggaattgcttgggagttggggagaactgtcaagaagagtgaagagagtgccaaagcggagatctgttcacctgggtggaggggaccactaagatcaagatcaaagattctccccatctcacagacaaggaaactgagnnagagggaggagagaattgctcatggctccagaactggtggcaagtttctctggactcttaggtttatttttaatatgaaatataaaaacagtttcaaatatcttattgagggagaagtaaaaacttatttaaaccccg

SEQ ID NO: 214 - DNA, 333 bp, Homo sapiens
  MUM1
atgagcgtgtctgaagatggggggctcagggggcacgtttgcgtttggacctgtctgtgcgttctcctgcgtggcagtcctgatttccatgcttctggagaatccatttcgttaacactgaaagccagttctcttttcctggcagtttttttcattttatttttggcattttttacaagataccgttcgggaaaggcttttgaaaggacggaagcgtattcactgtgcgccagtactcctggctgtgctgtggtttctcccgacgtgcacatcgatctcgtatgtgtggcatctgatattaaacgggaggttttaagaagcgtctgcccgtga

SEQ ID NO: 215 - DNA, 124048 bp, Homo sapiens
aagcttgtcactcatccatggtgtggttcaaactttcccttgtctgtgatgttcctgcaactagttctagatttttagactgcaataatctcattataaggtacagagctcattcaagaaggataaggggcatattgatttcctaaggatgattaacaaaacagcacaaacgaggtggcttgaaacaagagaaatttattctctcacaattcttgagggaagaagtccaaaatcaaggggttcacagagctgtaccccgagcttctggggaagatcccatcctttcctttcctggcttctggtaaccataggcattcctgggcttgtagcagcttcacttcaatctctaccttgtgctcgcttcggcagcacgtacattaaaatggaacttcaatcgctatccccattgtcacaagggggtcttccctgtgggtctgtgtccaaatttcctacttcttctaaggacaatctcgtattagattaagggcccaccctactccagtatcacatcttcgtaattacatctgcaatgaccctgtttccaacagaggtcacattctggggtactgagatgttagggctttcaacatatctctttggagaacacagttcaacctattaaataaagcatcccacaaaaccaaagtcagaaagcacagcagggttttgggatagaaagatagcaggagtcaacacagcctgtctctgtctttctgggagctcccggtctgtccttcctaagtctgtattgtgttctcaatctcttctttctttctctctctctctctctctcactctctctcccccatcttctcgctccccatctccctctctccctctctgtctctccgcccccccatgtattagtctgttttcacaatgctaataaagacatacccaagactgagtaatttataaagaaaaagagcggtcacggactcccagttccacatggctttggagatctcacaattatggcagaagacgaatgaggagcaaagtcacgtcttacatggtggcaggcaagagagtgtgtgcaggggaactcccctttttaaagccatcagatctcatgagacctattcactatcacgagaacagcatgggaaaaacccgccccatgattcaattacctcccaccatgtccctccgatgacatgtggaaattatgggagctacagtttgagatttaggtggggacacagccaaaccatatcaccctgcatatcagttttttctattgcaattgtccacaggccaaacatgactatattgtcaccaactttctatccccctctagtttcaagcaccttccagagataagctcagagattttcaactccaaatttctgggagagagtccacatggcctggctgtaatcccatatccaaccccttggtacacagccatggccagagccaaaagaatcctatggggttctggatctcctagggctctgggaagggcaagtttccgaaggaggaatgggggtggacaaaaattattggctgagaaaatagctggtgaacgagacattatttctggtagggaatgaatgcaagaggccactatgttctggagcacagagaaaactcccactggattctcaggaccgtctgagaggagaggaatttgaaagcagctgaattatcacaggagaaacagaatggagtcagaaaaattctgctttgtggcacttagatcaattctacgtctcatatctttgggagcatgggtggtttcccccaccctccattttcctcttctctctgaacaaaagttttagtttgtgaagtcaaatctcatctttttttttttttttttttttttttttgagacagtctcactctgtcacccaggctggagtacaagtggtatgatctcggctcactgcaacttccgtctccaaggttcaagtgattctcctgcctcaacctccagagtactgggattacaggtgtgcaccaccacatcttgctaatttttatatttttagtaaagacagggtttcaccatgttggccaggctggtcttgaactcctggcctcaggtgatccacccaccttggcctcccaaagtgctgggattacaggaatgagccaccacaccctgcccaaaccttgtcatttctgaaatagagtgtcagggtagtgtcttagttagcttgagctgctataacaaattataatagactgtgaagcttaaacaacagcaatttatttctcacagttctgggggctgggaagtctgagatcagggtgctggcatggtcagggtctggtgaggactctctcctggcttgcagatggctgccttctcactgtgtcctcatgtggtggagagacgggtatcatctctctcatatctcttcttacaagggcactaatcctattcatgagggctccaccctcatgatctcattactttccaaaggcctcacctcctgataccatcacattgggggttagacttcagcctatgaatctgagggcaacacaaccaatgtctgttagttcacggcagacagtgaaatagtggaaaggagggtgtgattgattctgggaagggctggtgttgaactctgactgcaggataaagccctcattggttctctgggccccggtaactgcccatctccccaagagggttcccacatccatttcctcccactctgggagtgagcccagcccagcatttcatcaacaactgatctcaggagccaaaagacacagggagaatatggtgatcagggagctgaggaagagggtgaaaaaaggcaaggggtgccaagcaactcaaccagcacttcccctccatcttctgctggatttgctcctttgtctccccagcaggtaggagggattgtccaagacaaagcattggttaccatctttctgtgccaaggctctgggagacaagactggattgcggtcctccttccttattgtacttattgtctaaccttaaggtacttccttatggtaccattttcacacgctgataaagacatacccccacaccccagactgagtaatttataaggaaaaataggtttaatggattcacagttccacatggctggggaagccttacagtcatagcggaagacaaaaggcacatcttacatggcagcaggcaagagagaatgagagccaagcagaaggggaaaccccttataaaaccatcagctcttatcagacttatttactaccatgagaacagtatgggggaactgcccccatgattcaattatctcccactgggtccctcccatgacacatgggaattatgggagctagaattcaagatgagatttgggtggggacacagcaaaaccatatcacttattctgtaggaagaaatgacttccaaggcattctccacccctgtctacatctgacagatagaattatatttaactatatattagtatattactatgacaataataactcatttattcctcacaccaaccctgtgctatccccgtttaaagatgagaaaacagaggcacagaaggtttgagtattatgcccaagatcattcagctgataaatgccatatccatctaactccaaatcccttgtggttgtacagtcagctgagctggcttttggataaaattggttggaggtgaatagagagaatgggttgggggaaagtggtggatgcccccagcaggtgtctcagaaataatgtgttgtcattttcactgtgaatatctcaggctcaagaataaaatcacttttctatataatgatttgcaatagtcatgattctttatgatgaaaatataacccaaatcaaacttgcctaagcaaaaaaatatatatataacataaaattcaccttcaagggatggggctggagttacccccggaagcaagaagaaaaattatgcagagcgcctggtatatccatcagagaccaccaatgtgttcctgtcaccccaacaggaagcagagaacccaaggctgtgttggcaagtagaagaccctagggacccagagggcccagagagcccagggattcccagtgcaaaccctcagatgccttggtgccttaaggaaaaacacaccagcctcatgctgcctaacttcagcaagaaaaaaaaggaccattcccttaatacaagcctcaattgccctgatgccttatggctgttattttagagaattataatgccacctatgattaataccgcaatgtggtcacacagcaaacgctcataagtaacctcccagcataaataccaagaaaatccagacttaccacggcttcatatacattttagatttttgctaaattggcccttgataaagcgtgtggccaccttcatcacagaaatcagcttcctccccaggcctaaaattagaagccccaactgccagtcgttaggtacagagctcaatgcctgctgagattcccctctcatttatcttctgcggggagcatttcaagttatcgccagctctcgtatcagctggcccggggaagggcagcaggcagcgagaggggcagctaacataggaagaggtcagcaggtgaggggtggctctggaggcggtggaactggctggtccctggaaagcttcccgctgcaggtctagagtggagaactcggactccaacagggaagattgtggctgggaagaattacagaccagatccagggctggattctgaatttagatggggcccgtaacaatttgcctaaatgatttatttcaacaatcaacacatccatatgctcagccactcagaatgatgactgaaataaaaatgaaaggtaacaggctgggcatggtggctcacacctgtaatcccagcactttaggaggccgaggtgggaggattgcttgagcccaggaattcaagaccagccctggcaatatagtgagactgcatctctacaaaaaaaaaaaaaaaaaaaaaaaaagaagagcaatagaaagagagaattggatgcatgctataacagcctatgatggtagatccagctggtctggggaaaaaggagagtatccaactaggcttccccaaggtcatgaatttttttttttttgagacagtctcactctgtcacccaggatgaggtgcaatggtgcaattacagttcactgcagcctcgaccttccaggctcacatgattctcccacgtcaacatcctaagtagctgggactacaggcatgcagcaccacatgcagctaattttttgtttttttttttcttttggtagagatggggtctcacttcattgcccaggctggtctctaactcctgggctcaagcgaacctcccacctcggcctcccaaagtgctgggattacaggtgtcagccatcatgcctggccagatgatgacatttaagctaagactaggacaatgaggagttatccaggtgtcaagtgagaggaatgcatttatacagagatagtaacatgtgcaaaggccctggggtgagaaggagttccatgtgttgaaggaattggaatgttgggaggaatgaaaagggtgtggcaaaatatgtgggctggggagggaggcaggggctagctcaggcaggatgagataaactctggtaagggttgtatgtgctcacagaaactcattaacacttcactgaatgctaatatttatttatcaggtttcagagtctgtttgttcgtgaggggagggttttccatcttctccacttgaatataaactccttgaaggcaatgacctttggttcacagttctatcaccagcacctagaacaagaactagaacaaaggtaaataaagacacccttatcaggcacaatgttgcaaagacttagtggttatcttccaggagccagtgaagggccagacctttcttaggaatgtgcaggatttgaactccccagacctgctgagtcaactctactgcaggggaccatacagagatgagaaagatgcgacattctttcacttctgggtagcagagtcaacaaatggaaccagggtgcccccaacgcccattacctatgacatcttcctctgaaataagctcaacagaagatggtccctggctacagtgacttttgtcagggatctccaagaccgccctcaggcccattgatttgccagaaggacccacagaatcaggaaagccattgtcctcatgaacattgtttattgcactaaaaggatacagattaaaatcaaccaaggtacaagatgcataggtctctccaagagagaccaggggtaagtttccagtagttttctcccagtggagttagaaggatagctcctaatgctctgtattagtctgttttcatgctgctgataaagacacacccgagactgggtaatttatgaaaaaaaaaaagaggtttaatggactcgcagttccacgtgactagggaggcctcacaatcatggcagaagagcaagggagagcaaagggatgtcttacatggcggctggcaaagagagaatgagagccaagtgaaaggggttctccttataaaaccatcagatcttgtgagacttattcactgccatgaaaacagtatgggggaaaccactcctgtgattcaattacttcccactgggtccctctcacaacacgtaggaattgtgggggctacaattcaagatgagatttgggtggggacacagccaagctataagagacaattagcaatgtatacaaagtactgccagccacagcagctcccccaagccttggtgtccaggggttttatcagcatttcatcacccaggcatggagcacctgcatgggtgacttttgttactcagtctccagcccctctagaggtcaaactgacacatacaaaaacaggcactcaccataaattgcattgttagcatggactagctagctcagcctgaggccataggtaaacaaagacactcttatcaggcagaatgttccaaagacttggcggttatctcccaggagccagtcaagggccagagctttctttggaatgtgcaggatttgaactccccagaccggctgagtcaactccttactgcatggggaccatatagagatgagaaagatgccatattctttcacttctgggtagcagagtcaacaaatggacgaggctgaacgaagacagtcaggtagaaccagaaaccacctccacctgcacccctgcataggacctaaaaaaatgtcataggaccatgacaacttttttgagacagggtctcagtctgccacccaggatgaagagcagtggtgcaatcatagctcactgcagcctcaacctcctgggctaatgctatcctcccatctcagcctcccaagtagctgggggcatgcaccacatctggctaattttttgactttttttttttttttttttggagagatggggtctcacttcgttgcccaggccggtctctaactcctgggctcatcaggagttagatgatcacccagatgaacaacagggacctcatccctccccaggggtcctggggtaggaccctcagcagatgagaggagtagctctcctggcccatacccataccctgttgtggtgtttataagcctgtcataggtcaggtttctagagagacaagctgtgggatggagatctgggtgcagggggtttactgggaggagcacctgctggaaagcaaggaagcagcattgggcagagaggggagtggcactgtggaacagtccccaggacccctgagacaccccctgtgatggttaatactgagtgtcaacttaattggattgaaggatacaaagtattgtttctggatgtgtctgtgagggtgttgccaaaaaagattaatatttgagtcagtggactaggaaaagcagacccaccctcaatctgggtgggcaccatctaatcagctgccagcataggtagaatataagcaggcagagcagcatagaagggcttgactggctgagtcttccagccttcatctttctctcgtgctggatgcttcctgccctcgaacgtcggactctgagttcttcagctttgggactcttggacttttgaccacagactgaaggctgcactgttagcgtccctacttttgaggctttgggatttggactggcttccttgctcctcagcttggagatggcctactgtgtgacctcacctggtgatcgtgtgagtcaatactccttaataaactccgctttttatatacatctatcctattagttctgtccctctagagaacgctgactaatacactcccatacggaggggcaagggacagagcctttgtaaccctccaggattatgggatgcctaggaggggaggaggatttcccagcactaggtggcttcctgcaggtgccttcttgccagaggcaggactttgctatgagctgttagcagctaggtctcccagcagctggggggacagagggcctcggtggtcctgcacagaggtctgagtggtatagcacccacagcgaagccagtgaccaaagtggaaagataaagatatgaaaatctttcaactaattaagatttaaaactcagattgatgtgaggatcctgaattgactgtttaccaaagagactaggttttaaatgagaagggtctgggtttacattgacttggcaagactgagtgtcctatcactggagtgacaagggaggctggtggggatggatccagggaaaagaagcaaagtatggaacaaagaagtttagaataaagaaagtggccaaggctgggcgccacggttcacacctgtaatcccagggtggccaaggcaggaagattgcttgagcccagaagttcaaggctgcagtgagctatgatcatgccactgcactccagcctgggtaacaaagcaagaaaaaaaaaaagcaagaaaggaagggagggatggaggaaggaaggaagggagagagggaaagagagagagaaagaggaaagaaagaaaaagaaagaagaaggaaaaaagaaagaagaacgaaagaaagaaaggaaggaaggaaggaaggaaggaaggaagaaaagaaagaaagaaagaaagaaagaaagaaagaaaaaaagacagagagagacagaaagaaagaaagaaagaaagaaagaaagaaagaaagaaagaaagaaagaaagaaagaaagaggcatcaaacctcacaggttgaggtaactgtaaatacacggtagtttatccctgagcacaaaatctcaatggcacagtcaaagccccaaagaagtaagaaacaaacatcatttccaccttttgggcctgaagaagcaggtacattagagaagggcagccacaatatctgtgaacagtcattaagctctcagacacagcatcccaccttcaccaatctgatctccttgaggggggtgatgctccctccaagataacaaagaaaacctggccaggcacagtggcccacgtctgtaatcccagcattttggaaggctgaggcaggaggattgctagagcccaggagttcaagaccagcctgggcaacatagtgagacccctgtctcttaataaaataagaaaaaagaaaaggaaaccttccctttacatgaaggcatcataccttaaatgcacatcccatctgcccaggaggctcacctctagatttgtatcctactgatgaacacacaccaagatggacatactagcataaattgtggagaatgacagaaaatatcctgaatgtccaccatgagggaactgattaatttatacacatccgtatactggaatactacacagctgataaaaagaataaggaatgtctatatggactgctatgcaaaaacctcaaagatatattgttgaatgaagtcaagatgcagtgtaatatgtacaatgggctatcatttataaaaccgggaggagacatatatacatatgtttttctatataaagattgtatctctggaaagtttcaagagaagccagcaacacttttgaccttggagaagaagaactggtggttgggatggaaaacaaacttaattttcactgtatactttttctggtactgtttaatttttttttttttaccatatgcacacgtttcctattcaaaagagaatttttttgaataggaaacaatgaaaaatcttataggcatacaaactaaattaattagccatccctatagcttcaacatgcatttcaatttgcaagcaccctggcctccaagattgattgattggctgtaaattgagaacctcagcaatttcctttcacagggacagatgttgacattattcctgtgatttttcacagatgtttcccttccagcatctttaaaatcgagttttctgtcaatttggaaatcccaaatttctcatatcaaatcgagatgacaggaaaatcaaaaccgttatcacattttgaaagagtttatggatggcaaatgacactgggaagggagatgtttaaggagcagccgacgtctcttaaccctttctcatcacttcctgcctcagtttacctaagccagaaaaaggggaaatttgattcaatatacagacaagggctttagagtctgcgtagctgtgcgatctcactttggctccaactgtctagctgtgatactttgaaccagttcattaacttgcccagcctcctctctctcatctgtaaaatggggataatatccccagccttgcagtgtgattttacaattcactgatgcaaaaatggaaaatgcgtggcacttagcaccacctaaatgttttttcctttttttttccctttccctcctccttcaccaatcctccaagcagcttttcttccttcttcatgtccccattttgctcacgagattccaagatttacccactgaagctctcatgagattcccagatttacccattgttgagaaatcagaaacatcccccaccccctagaattctcctgacctgtgtcccctccccttaggactctgctctccctcagtgacaacaggcaggaatatgatctactcatacaaaccaaacctctgctgtttgtacatcttagctaataatgcccaacacgcagccaacatttactaagtcaggctcttgagagccacttcatctgcatgacgccacaaaatcctctcagcaacaaaaaggcactgttattatttctgttttagagatgtggaaatgagcaccagaggtagatgtaacttgacaaatatctgggtggtagatctggaaatcaaagaaccctgaaccccaaccacagacacatcttcagttcaggctgggtctctacgctttgttatttttaacggggcattacgctccctggatggctatgatgctgcagttaactctgctcttgtggatgaatgcaattatctggggagctcgcacttataagatgtacagctatgggcaacctaaggcacatcgtggagtcttaatttcctcatctgtcaaatgagaatagcaaggatggcagggagggattaaggagcatttttggaaaaggaagtgctatgaaatgaacgtttgtgcctccacccccaaactgatatgtcgaagctgacaccctaattaccagtgttacggtatttgggtatttgaagatgcggctttggtgattatgtttagatgagatcataagcctaaggtcctggagatgtgatgtgtccatattagaagagacaccagagatacctttctctctctctcactcttgcttgatctctccctctctctcttgcactctctctcatgcttgcgtgctctctctctcccctgtgaggatacaacaagaaggcttccaactgaaagccacaaagagggccctcactggagaaacaaatcacccagcaccttgatcttcgaattcccagcccccagaatagtgaacaataaatgtctcctgtttaagccacgtagtatgtggtattttgtatggcagcctgagcagactgccacagtagatggttggtctttcctccaaccaataatagatggcttgtcctttccatcgcccaccttgggcaaggcaaacaggacagtgaaggcaagcacatctcacagacaccagcattcatgtgctaatgaggctcactactagtattgcaaagatgggaagtcaaacagaattatgtccttgcgaacatacaataacttggaaaattttattgaaagacattaagtttgcatacacacaaaaatgagtgaagagttttttgttccattgaataatttagaggacatctaagagaacacaagtttgaaatcttattatattttgtataatgatacataataatttccatgataaagctgatgtgtattgaggagatcatatgtgccaagcactcactgtgtgttaagcatattctattcattgtatcatttaatcctcaaaatattatcaccgcctgtattgattggggttttccagagaaacagaaccaatgtctaaacagagagagagatttcacgcaattatggaggctaacaagtgctgtcatctgcagggtgaggcagcaaactggagaccccagagaactgatggtgttagttccagtcctaaggccagcaggctcgaaacccggaaagagcagtgtttcagtctgagtacaaaggcagaaaaaagccaatggtgcagtttaaaaaccttcaggcaggaggaattctctcttacttcggaaaggaccgacttttgctctattcaggtcttccgtggattggatgaagtccacccacattaggaggggcaactgctttcctcaatctgccaatttaaatgacaatcatcccaaaacgccctcacgaacacacccaaaatgatgtttaggcaaatagctgtgcacctgtatccctaagagttaacacataaaacctaccatcccatcactctttccaaatagaaaaagtgaggctcagagaggttaagtcacttccccaaagtcacagagcttcttataagtggtggagggtttgactgaggacccatgctctattgtaatcatagaaaatcctagtggaattttccaatagaataaaacgcctgcccagctgcagccaaacgttccatagacaatgtctctgggccttttgtggcagaaaaaccaacataaggaaaagaaggctggagatgccagttttatcaaactcccataaggtaaagggaaatatctttctggggaaaggagactaaaggagaaaattaacagccacttttcagggagagagaaagagcagggacccagcccctctgagactgtgggctgggtgtggcctgagctgattggcagctccattgtaactatactgtaaaggaatgactctacccaaactgacctaaaggagagtttgaagcatttttaaaaactctgcccaggccaggcgtggtggctcatgcctgtaatctcagcactttgggaagctgaggcaggcagatcatttgagatcaggagttcaagaccagcctggacaacatggtgaaacctcatctctactaaaaatacaaaaatcagctgggtgtggtggtgcacacctgtaatcccagctctttgggaggccaagacaggtgaatcacctgaggtcgggagtttgagaccagccaggccaacatggtgaagtcccatctctactaaaaacacaaaaattagctgaacatggtggtggacacctgtaatcccagctacttgggaggctgaggcaggagaatcacttgaacccaagaggcagaggttgcagtgagccaagactgcgccactgcactccagcctgggtgacagagcgagactctgtccaaaaaaaaaaaaaaaaaaattctcagacaaccagcagtgatacaagagataaaaggcatctggctttacgctgcaaacaaaagggaaacaggaagtgagagagcagttggcctctaagaagcatccatttgttttaccctgccaggtgcctacaaggtgatggttttgcctcccaaatataatcaggggcccaatctctgcattcagagaagtatatttcagcaacccataagtaatccaaaagcagttccccacacatcagctcaaacagtgttacaggacaggcattcttggtgccatcagatccaatgtcccatgttttaaccaacaattgaaaagccctcttttttttttgagacagggtcttactctatagtccaggctggagggcagtggtgggatcttggctcattgcaacctccacctcctgagttcaagcgattctcgtgcctcagcctcccgagtagctgggattacagatgcgtgccaccatgcccggtacattgttttttttgtatttttggtagagacagggtttcaccatgttggccaggctggtctcgaactcctgacctcaaatgatccaccagcctcagcctcccaaagtgctgggattataggcgtgagccaccatgcccagctgaaaagctctcttttctaccctgaaaaaaaaaaaaaaatgtgctgatcctataacccatctactcttctaaccaatcacaattgtgccctaattataataaaaaggagaaatgaaatgatgaggatttctaatgaaataatatatagagaaatgatatgggtttccaccaggaaagacggagcgaagcagtcaagtgctcacacacgtgtgtgtagaataaccagtgacagtcacaaacgcagacagcgtggtgtgttgtcgcatcagctttactgagagtgccatgttcttcaaaagagtggctctttcttgataaattcccataccaaacagagtcaaatcttctcttgatttacaccatagctgctacattcttggaaacatcagtgttcattcaacacttacatgtaaaatagaacatgtaaacatataaaatagaataggcagataaaatagaagaaggttggaccgggcgtggtggctcacacctgtaatcctagcactttgggaggccaaggtgggccgatcacaagatcaagagagcaagaccatcctggccaacagggtgaaaccccgtctctactaaaaatacaaaaattagctggacgtggtagtacccgcctgtagtcccagctactcgggaggctggggcaggagaatcgctggaaccagggaggcagaggttgcagtgagccgagatggcaccactgcactccagcctgggtgacagagtgagactctgtttcaaaaaaaaaaaaaaaaatagaacaaggttatagactctgataatcatggttcttctaacccatatgaatttgggatctacacatatatatattcaaaaaactaccccacaccgtaatgactcccccatccctatcattagggcaaccaaaagctctctgcagatttaaaacacacacacacaaacacacacacacacacacacacacacacacacaaacacacacacacacacacacacaaacacacacacacacaaacacacacacacgggacaattcagtccccagtgagaacctctgtaataaaaggtccaattcctaacccgcaataatattctttttttttttttttgagacagagtctcgctgtcgcccgggctggagtgcagtggtgcgacctcagctcactgcaagctccgcctcccaggttcacgccattctcctgcctcagcctcccgagtagctgggactacaggcatccgccaccatggccggctacttttttgtatttttagtagagacggggtttcactgcgttagccaggatggtctcgatctactgacctcgtgatctgcccgcctcagcctccaaagtgctgggattacaggcgtgagccaccacgcctggcccacaataatattcttaaagtcccctttcccgcctcctcagttctcccacaattcccagtttccccagaacaaaccccaagagatttctctgcccttccccccacccccaggcagagatgtcttccaactcttccccagcactgtaactctccactctggtcaagtggactccaccttggggaaagaatgtttgtaccgggcaccaaactagactttggagatacactagttcttagtatctgctagtgtgataattaaggtaattatttagaccaggaatctgcaaaatacagcctgaaggccaaatccgagctgcttgttttcctatggcctgaaagctaagaaagaatggttcttacattttatattattattattattattattattattattattattattattttgagatggagtctcgctctgtcgcccaggctggagtgcagtggcaccatctcagctcactgcaacatctgcctgccaggttcaagcgattctactgcctcagcctcctgagtagctggaattacaggcacctgccaccacacccggctaatttttgtatttttagtagagacagggctttaccatgttgtccaggctggtctcgaactcctgacctcaggtcatccgcccacctcggcctcccaaagtactgggattacaggcatgagccactgcgcccagctagttcttacattttaaatagttagtgggaaaaagacaaaaggaataatacgtcattacatgacaattatatgaaattccaatttcagagtttataaataaagtattgtctgtggctgcttttgcactacaatggcagggttgcatggttgcaagagagcacatggcccccaaagcctcaaataatccactatctgggcctttacagtaaggttgtcagcccctggcttaggcactaaacaagtgctttcaagcacctactatatgccagacactaaggtaatagagaggggagacaatcaacaagaagcattctttctcaaaagttttaggctgggcacagtggctaaagcctataatcccagtactttgggaggtcgcggcaggagggtcaattgaatgcaggagtccaagaccagcctagacaacatagtaagaccccgtctcctcaaaaaatgcaaaaaaaaaaaaaaaaattagttgagcatggcagtgtgtgcctgtagtcccaggtagttgggaggctgaggtgggaggatcacttgagcccaggaggtcaaggctgcagtgagccaagccatgatggtgcaatggcactgcagcctgggagacagagtgagaccctgtctcaaataaataaataagtaaattaattaattaattaaattaaaagcatgttattcagaatcacatagacttgggctcagctcttcagccataagcatgtttcttttctctttttctttttttttttttttgttgagacagagccttgctctgtcacccaggttggagtgcagtggcacaatcttggctgactgcaacctccacctcgtgaggtcaagcgattctcctacctcagcttcctgagtagctgggattacaggcacgtgccacgatgctcggctaatatttgttttcctttttttttttttttttttgagacggagtttcgctctttttgcccaggctggagtgcaatggtgcaatctcagctcactgcaacctcctgccttccgggttcattcgattctcctgtctcagcttcccgagtaactgggattacaggtgcatgccaccacacctggcctaatgtttgtatttttagtagagacagggtttcaccatgttggccaggctgatctcgaatgctgaacctcatgatctgcccacctcagcctcccaaagtgctgggattacaagcgtgagccaccgcgcccggcccatgagcatgtttcttgacctcagtttccccttctgtaaagcatggtgtggattgttcacctcgcatgggcatgtgaatatcaaatgagacatcctgtgcaatgtgcctcagacaaagaaaggagatcagcaaataatatttcctttctagttcatcctctcttcccatgtatgccaagaaagcaggcgagattgagtgagggaggtcatatcctctttgtctaaatgttttcttgttagagaacatctttcttcttaacatcccttcctacataaagaatctctgtcagaggaatattaaaaggccctaacctacagttagatggaaggcgagactccgatctcacagctgaatcactttagtctacctctctacccatctaatgctatccccttcaaaaataataataataatatgaaagttgggaagtggaaaaccatcctctggagttttcaaaaactaattccgttgtaatcatagaagactgaaggcaggattcatgacacatttctcttcctcctgggcagatgaatctacaatttgtatttgattttaaatgtgattctcctgcatcttcagtgggtttgattgatagagcacatggggccactcagtaaaatgatacagtggagatcaaagccggaaagataatttttgccaaaatgtctgcagccgacagtgagttataagcctttgtctcccactttacggaacacaattttatttaaagccgaaatctgtcactttggtattgtttattgaaatgcatcccataccacggtcccgtgaagaacaacgtcaagtcaaaaggtaaaaaaatccaatggttacaaacagcccaggaccaaataaaggagggagaatgcttccaatctgcgtaaatattacccaccagtgatgcatttggggcaagcaatgaagtcattcatctgcaaagtaaatatctggcattgtcagaggtgcctgacacagccccataaacccagtgagttctgttccattcagcagctcacacatctctatttgataactttgctttatttatgggtccacaatgggagtcataactgggtttttatctttgcacaacttttttactttattttttgagacagggtctcactctgtcacccaggctggaagtgcagtggtgtgatcacagctcactgcagcctcgacctcctgtgcccaagcaatcctcccacctcagcctcccaagtagatgggattacagaaatgcacttccacaccttgctaatttatattagtttttgtagagacgggctctccctaggttgctcaggctggtcttgaactcctgggctcaagtgatcctcccacctaggccttccaagtagctgggactacagatgcacaccaccatacccagctaatttttaaattttttatagaaaaggagtctcactatgttgcccaggctagtctcaaactcctggcctcaagacattctcccaccctggcctcccaaattgctgagattacaggtgtgagccactgtgcccagcttgcacagcttttttaaaccttttttttttttttgtattcattcacgcttttcatacatcatgattgaggatctaccctgcagactgtatggagttatctagaaggcaggaaggcagagaactaaaacctttggttaaaatatctggggttgagctcagtgtttcctgctctccagctatgtgaccttgatcgggtctcttcacctgtctgaacctcagtttccccactgcaaagtggagagcaaatgagaccatggacttggaaatgcttcatacatttctgagtgcctcacagatatgaagcccaaagatagcaccattctaggctctgtcaggacaatgaggccaaagttgtcactgatgccataaagttgtctctacagcgaaaggtccctggaattagcaggaggcttttgtggagcaaatgcctccttttctgcgtagaaagtgagatgcctcaatcactctgcctagatgcctctagatgcctcaattcctctgccaccaacagactctgtgacattgggtcacttttgagattcctgggtcctgcctacttcaccagaatgtcatgttctggaaccttctcagtctccaacctcatcactcacaagcttttcttatgctttgatagatgctacaattgcttgtcaaaaaaagagcctcatcttctccgttgctaagagaaccccaatttttaaagtattgaacagtcacatgctttaggagaagttgcccttctgagcctcaaggagtgaatcttgactgacctaaactaatcatagtaatactgaccccctgtctagtgattgctttcgaataggcacgtgacccattgtgaccaatgagagttgatggaaatttcctccttgctgtcaacaatggacacaaggaagacacattttctcctctgacctttggacattgaacgttattgtgttaggatgtgatgtaaggcactgtggcacccattttgtgctcattagaggaaaagactggaattaagcccttgctctgtaagtcagagcacaaagatggcaagagcccaggtctttgatgatacaactgaactactgaataaaccaaccctagactcacctacccccaaattccttttaatgtgagagaataatgtcccatcttgtttaagcaatttcaggtttccattacttactaatgaatatatttggattccaagttgttatttccttgcatggaatgcttctgacacaactcacccttgctagcctcaagggtggtggccgaactggggagggtccaagaggaattgcaaaaaacagagctgcaaggagcagccttatctctgaccgctgtggtgagccctccactttgtataccctcccccaaccgtgtgactctggatcagccaatcaggtgatctctcttggcaccttgactcatgatgcaagaacacaggccctattgggtttccatgaattctctgcagggagagcaggggtccccagatcagcctatccctaacgcatgcccttggaggagttgccactataaagctatctggagtcaccttgtatggggtgttttccaaggctgggccttcagcagtgccttcggcatgttctctttctttggtaagagtcagtttctggggtgaacaactgagaactcagggacatagacaagaaatcatgtctcattcttaaaagcctcagcacaagtcctggcatagagtaagtgttgatgggaggttggatgaatgaataaaggagtgagaaagttaattgcttcccttctctgggctgctgtatcaatcaaggttgtggcaggaaatacatagtaaactgaaatggggtaactaaaaagagtttagcaaagggctatatatagctgtataagtgggattaaaaaaaacaaaaacaaaaagggaggttgcagtagccctaactagcagcagtgaggagccatttctacccctagacctggaggggaaatagttatggaacccaaggagagtagccacagtcttcagggaaagacagctgcctggcaggagcttccaacctatggcaacccaacaggaaggagccacagaaataaatatccgaatccctctctcctcccaccttctagtattctatgatccccaccccattggccaaacccaagcagccacaagaggatgggagaccacatgtgatgtagtccatagaagtcagcctcctggggtacaaagcaggaaatgggggtggacagtggatgtaaaggagcaaatacaaaatatccggcacagatattgctatggtttgcatgtgttccccaaagttcgagtgctggaaacttaatccctgatgcaaccgtgttgagaggtgaggccttcaagaggtgtttggatcatggggacatcatctttctgaatggattaatgcctttatcatgggagcgggctggttttcacaggagtaggtgctctctctcaccctctctctcacccatgtgatgccttgggtcacaccatgatgcagcaagaaggccttcaccagatgtaagctctcaacctcggacttcccagcctccagaactgtgagccaagtaaatttctattcattgtaaattacctggtctgtggtattctgttatagcagcacaaaatggactaagacagatagtatctagtgataggatagactacaagaatctctttcacccagatcctgcagccacaaaagggccaacgctctttggagagtttatctctcacccaagcagccaccagcatcatcagaaaacagcaatgttcctctacacgcttgtgtgtttccttcattggtacaagtttccaccattgttttgctcataagagaaaccattctccaaagcccagagtaattatagagcccataagtcttggggctttctgaatttgaagcagattcagggctcaagagagccaagaagtcatatcaatgccaggaatctggaccccaggcagacagcgtggataacctaccccaacagaggtgcaggctctcttcctttcacccaaaaaatagcaaacacatttattgatcaccgtgggccttttccttccacctggaggttagcaggaactttcaaaggtttagtgtcatccatatcccattgtcttcttcatgcacagaaaagacaaacttcttcatctctggaaaggagacatggactcacactccccttattctgaatttttgcccactaagccatttcacaggaagttagccatggtttgtggatttttaaatgcttctgggaggagaaggatttactagtgataagaaataaaaatgcaaatgttttactgatgagatatgcatgtaaagtgcttgatataatgcctgacatggaaaaaacactcaataaacgttagtcatcagtatttatatcatcattccttttaatacacgccatcgactgggtgcagtggctcacgcctgttatcccagcactttgggaagcagaggcgggaggatcacttgagcccaggagtttgagacgagcctgggcaacataagaagaccccatctctataaaagaatctttaaaaattacctaggtatggtggcatgtgcatacagtcccagctactcaggaggctggggtgggaggatcaattgagcccaggaggtcaaaatgaggctgcagtgaaccatgatagtacaaaaaaatagttagaaagaatgaataaggccgggcgcggtggcttactcctgtaatcccaacactttgggaggccaaggtgggtggatcacgaggtcaggacttcgagaccagcccggtcaatatggtgaaaccccatctctactaaaaaatacaaaagttagccgggcgtggtgacaggcgcctgtagtcccagctacccaggaggctgaggcaggagaattcctggaacctgggaggcagaggttgcagtgagccaagatcgcaccactgcactccagcctgggcgacagagcaagactccatctcaaaaaaaaaaaaaaaaaaagaatgaataagacctactatttgctagcacaatggggtgactataatcaaaaacaatttaatcgtacattttagaataactaaaagagaataattagattgtaacacaaaggaaaacgcttgagatgatggataccccatttagcctgatgtgataattacacattgcatgcctataatatctcacgtaacccataaatatatacacctacgatgtagtcacaaaaactaaaactaaatataaaacaacaagcatttatcatctaattgtctggatttggaacccacaagccaactcagctaagtgctctggcttagggtctccaatgaggctgcaggtaagatgtcagccaggactgcagtcatctgagcgtttctggggctgaagactaggcttccaggctcactgtgtggttgtctctattccttactggctcttagacagaaacctcaattcctcaccacgtgggcctctccataaagtgccttagtgtcctcaaaacatggcagctggcttcctccaaagcgactgatccaagaaagagaaagaaagagccaacaatggaagctgcagtctttcatgacgtaatcgcggaagtgacataacatcacttctgcggcattggtcacacacgagccccaacatggatctttccagcgtgggaggggactaaacaaggtgtgaatggcagcaggcagggattgttgcgggccatcttgaaaactggttccctcagaggagagctggaaggctggggacaaggacacaagagaggcttttttatttttttatttttttgagaccgagtctcgctctcgctgcccaggctgaagtgcaatggcgcgatctcagctcactgcaacctccgcctcccgggttccaggaattctcctgcctcagcctcagcagagttccccaagggtacctgttggcctagtttgagactcttggctctgttagtgggagtctcaaactatgctccaggctgctgattgttctgagggatttctctctctttctttctaacactaagaaataggaacttggcctcccagagtgctgggattacaggcgtgagccaccacgcctggcctgtctgtaatctttaaaagtaatagcatattagctctgagggtcggttggattttcttttttaaacagttggcagtcatttgtagccaagtcaggtgaaaagggtaggtgatcaagctcattacaatttttattgaaataaaatttatctttagtaacgagattgattttttgtgtgtgactccggagggcagtttgcccagagcagtggttttcaaactcttaacaaactatccctgagaggaaaagagaatgaattcatactctgtggagtgtagcccaaaataacctctgcaaaggtgaaattttctttgaagtcttattttaccttaggtatttgtgaactctgcgttctattttgtgccacatgtgttttaagttactattactctactaaagtttattcatcctccaggaagatgatgatgtttgtactgtagttttttatgtcccagggatacagcagggttccccaagggtatctgttggcctagtttgagactcttggctctgttagtgggagtctcaaactatgctccaggctgctgattgttctgagggatttctctttctttctaacactaagaaataggaaacacagttttcagtttaaaaataacataattacaaagtgtagaaaagtctctcttggccgggcacggtggctcatgcctgtaataccagcactttggaaggccgaggcgggtggatcacgaggttaggagttcgagaccagcctcgccaacatggcaaaatcccatctctactaaaaatacaaaaattagctgggtgtggaggcaggcagctgtaatcccagctacttgggaggctgaggcaggagaatcccttgaacccaggaggtggaggttgcagtgagctgagaatgcactactgcactccagcctgggcgacagagcgagactgtctcaaaaaaaaaaaaaaaattacaggcaaaagaggttgcccatgttctcatcattggcagcagcagcatcaaaatatggcacccactccagtgatgcctttccagaaggagcaacactcatgtgaaaccaccagctttgctttgtttttgtttttgttgttgttgttttttcagagacagagtctcactctgttgctcaggctggagtgcagtggtgggatcatagctcactgcagccttgaactcctgggctcaagcgatcctcctgcttcagcctccccagtagctgtggctacaggtgcacaccagcacgccttgctaattcaaaaaaagaaaaaaaagaaaagaattgtagagatggggtctcgctatattgcccaggctggtctcaaacttctgacctcaattgatcctcctgccttggcctcccaaagtggcaggattacaggcataatccagccattgtccctggcctggcttttttttttttttttttttttaatgtagctcatgaccacaaacggagtttggtttccttgctctctctttttcccatttggtacttttctttctctcccatgcactcctcttcaaaccaaaagtgaatcttgttatttcttgaaaaatgtgtagatgttgaagggatgaaaaacctgaactctaacgtctgactatctgaacccaaattctagccgccccactcagttgctgtgtgactgtgagtaagttcttaccctctctgagcctgtttcttcacttggaaaataaaagtatacacatatacagctgttagccagaactcagcctagggtaacctttcaataaatattagcatcatcaaggaaatcgcttgacaaattaattttcattaagcaatgagggtctataacagtgatgacttctgaccaaccaaccagcccaatggctgacaaaggactgataacactttacatttttataatttccctagatttcaaattctccataaggagcaagtacagtttttataatcagacatagaactcgcgttcactctgctcatcctgaccctagccactggccaccaatttctgggttggctgctccaacctgagagcacagctactggaatcagaggcagaggagctcctcttgcgttcgttgttggtttcccttggttttgtaaaaataaataaataataaaatagggatacacccttcagacagcaggtaacttcctaagctaagatgaacaggaggaaatttaaatgtctttccccggttcaaatcccctaccctctcccatctgcctaccctgggctccaacactcgggagaaagaccataagtcgttcagatgatgctttggagctggacaatcaatcgtgatcaaaaacaggggcatgggagcctggctaacgtggagggatgggagaaaatcaggctgaattagagaagggtacattgtggagtgtgttttacaacgccattagttctaagcacataaggatttcaaatcaaggagcatccacacacacacaaactcttggattccttaagagataaggcggatccaaaattagcatatagatcagaggcatgcagttgagtgctgctaaagtgggctataaatgcttgggggaaaatagttgtttttctgaagaaactttacaacattccaaaatcttgtccaggaagtgtgaactctaagtccaatggactgaactgtgtcccctcaaaattgatatgttgaagccttaacttccattatgatggtattaggaggtgggcttttttggaagactattagtttagatgagatcatgaggatgaggtcttcgtgatggaattagcatccttacaagaaaagacaccagacggcttgctctcttgctctgtctctcctcttccctccctccctctctctctccctctctacctccgctccccccaccccccacttcctccgtcatgtgagaatgcagagagaaagcagctttctgcaagccaggaggagggtccgctgggagctacatcagccagattgtggcacttctcagcctccaaaactgtgagaaatagatttctgttgcttaagccatccagtttatactattttgttatttgcagcctgatatggttcggatttgtgtccccacccaaatctcgtgtcgaatcataatccccagtgttggaggaggggcctgggggaaggggattggatcacggggacagacttgccccttgctgttctcatgacagtgagtgagttctcacaagatctggttgtttaaaagtgtgtagcactttcccctttgctctcttcctcctactccagccatgtaggacatgccagcttccctttcaccttctgccatgattgtaagtttcctgaggcttcctcagctatgcttcctgtacagcctgcaaaactgtgagccaattaaacctcttttctttataaattacccagtctcaggtatttctttataacaatgcaagaagagactaatacacagcccaaactaactaagacaaacccactctgacccattctgacacccaaactaactaagtcctggtttgaacccttcactattgtgtcaccttggggcaagtcacccaacttctccaaatgtttgtttcccaccaggaagatggaaatgacagtacctctccttcctaccccgcaaacctatcaggaggatcgaaagggacatggcaagcaaatactttctaaactgtaaagtgctgtgcaaatgcaagacagcattactctctttttatggagttatttatactctacctggttacagcagaggatttatggtagatgtcagtaagactctttattttgaattttaagagagaaataagaatctttgttatctgtagagaaacaaatataatttccatggggcactaatataatataatataatataatataatataatataatataatataaatataccttaccgaataaaccctttgctcagacgtagtgaaaaggtaaattccccttcaacctaatgaagtttcagtcgctcacattttctgaatttgccgaacagaaatgcgatcaggtgcctactaagtgcagtacccagcacgatgtctaacattgaaacatacagtgtatacaccagcacctccaccaaacccatatccagcatgcaaaacatacccttttcaagtcggaagcacatagatagattttttggagttcaaaaggtcttaatgcaaactggctccaattccttttttttttttttttttaaatctttgaaacattggttaagtcttctcagagctatcattttgcacacatggaaactttagaccatccatccttcaagtgtcttggggtaattagagatactgaaggttaaggacctagcatactactaatagattttcaacaaatggtagctactgttatttctcatcattgcagatttaagagtgccaattctcagagcacttcagataaaaaccctacctttcttaaggcaaaaaacaacggcattaacttttttttttaattaacctaagttcccattatgtttagagaagagatcacaatgataaatgcttgccctgtctctcttttttaaaaatttactgttcttacatgtgacatatactgtggtacttagtgtcaccctacaaagaataaatttaaattgaagaaacagaaacacgggagagtccttgtttgggtttaatttgtatctgactacaataaaattctatcctggaagctagagtcataaaactaaaagtcaggaaggaaaagaatggctaattaagctccaaaactaaaagctctttctttattgctatttctttaagtcctaacaattggtcaggcacagggtcttagctgtgccattctagttaatggtcggttacaaatttccaccataaactcatcttccttctagcaacttaaatctcaggcactgggatgtaataaggagagaaagctcttaggcccagggcaatctctctctcaatcccaatctcccttccccccatccctatcccaccacagtaactgttagtaagagcttttggttgcatgcccagaaatctaactctggctaaattaatcaagaaacgaatatactggtttacccagctgaggtcatttacggaaagggaatgctaaggtttgaatgtgtctcctccaaaattcatgttgaaacttaatccttattgcagtggtattaagaggtggggccttttaggaagtgattcagtcaggagggcttggcccttaagcaatgaattcatgccttataaaggggtagagggaactaacttaggccctttcgcccttccaccttccacatatgaggatacagcattcatgccctccagaggacacaaggcaccaccttagaagtaaggaacagagccccttaccagacacaaaatgtgcctgtgccttgatcctggactcctcagcctccagaacggtgagaaataagtttctgtcctttataagttatctagtcttgggtattttgttacagcagcaaaaacagactaagacaggaagagaaaagaaccagagccccagggactagaaacaggactcactgcctcaaagtacatgtatactctctctctctctctctctcgctctctctctctctctctctctctctctgtctccatttctcttcactgtttgtctttgctcagccttattctccatctctctccatgtgggagggcaagtagaggctggcacctccagatatatatcctctctgttcaagaaccacaataagttaatccccagggaagattctgatgcctgtgccactccaaggtccaacactgctgggtggatagagcctgatgtttgaccagatatgtgccacttaccaaccatagcagacactggcaatggccacccatgtcccttggaccctccccatcccatacaagctgaaggcctccctctgcaagcacctgcaactccccacctgaaggccttttctcggcctcggcaagacaggccagaagttcaaggatgtcaaagtccctgagagaatcccttggtcaatgtcagatgagtgatgaaagataaatatctcagttttctcaacactcaggtgggacactttgaggtgtgttccatgccatcaaccaaagcccatcaaaaggaccaagccccggctgcccatagaagtaacttactcattaccttgctctattctggtttagatttccttgtctcattttgccctgtgatggttaattttatgtgtcaacctgactgggacgctgagtgcccagataattggtaaaacattattctgggtgttcccgtgaaggtgttttcagacgagattaacatttaaatcggtagacggaggaaagcaggttgcactccagatgtgcgtggtcctcatccaatcagttgaaggtctaaatagaacaaaaggccaacccttgcctgagtcagagagatctcctcctgcctgagggccttcaaactgaaacgtcaaaattttcctgcctttagactcaaactgaaacacggctctttctggatctcaagcctgctggttttcagactggaactacaccactgggtctcctgggtctccagcttactgactcattctgcagatcttaggacttgtcagcctccataattgcatacacacacacacatacacacacacacacacatatatataaaagtgcatatagatacatatatgtatgtgaatgtatgtatataaaagtgcatatagatacatatatgtatgtgtatatatatatacacacatacacacacatatatgtgtgtgtgtgtgtgtgtgtacatatacatgtgtgtatatatacacacacacacacacacacacacacatatatatatatatatatatggaccatagagaagtctctaagccaaagctggggacaggggaatcctgtgtctcctggggagaggtctgctttagtgtccctgccatgctcagtcattagccaggagcacctcatggaaggaagcttatggattccccatatgcttatatatgtgtgtgtgtgtgtgtgtgtgtatatgtatatgcatatgtgtgtgtgtatgtgtgtgtgctattctattggttctacttctctaaagaaccctgactaatacactcccattctcctactggtgcttcccagagtcaccctacaaataaaccattacatggaaatcctcatcacaggatctgcctctgggaaaacccagcctaagacatccatgactttcataggagaagaaagagctctagaattggcagccttactgaaccatgtggaagaggaaaggagagcacctaaacaaaagggtattaaccaattaaaataacctaaacccacacttgtccaaattgctgagcaagtgggatgggatgaaacaactttcaaccagtgtccaaatattgctgtgactcctagactggcttgacacaaaggcagtgtccaccagctctaaacatccatctcaactaagatttctccaggaaggctagaactgacaccctctgcttaggttctcagtgacttcacccagccagcaaaggagctcttaggaaggcagacaagccctgaagtctgtctgctcagactccagctacctgctctattcctgctttatcaacctctagcttagtcgctcaatctccagctttgctccttcccattagattctatggctgaacctgactgccatagtttgtttctcagatgaatttaaggcaagggttgcaaacttaaatgcacacatgggcagacaagtaacacaaatgagtgaagagtacagattagggcaactgggtctggtggagactgtggcaaactagagagcacacaacctatctaaggaggcagcgaggactcaattttgcaagatttgtggaatggactcccaatgttgccaaactgccactattttttaaagagaagcaggaaatccaggggtttttaaagatgtaaaatacacagtttgttgaatgctggcgactgatttttttttttttttttttgagacaagagtctcactctgttgcccaggctggagtgcagtggcatgatctcagctcactgcagcctcctcctcccacattcaagaaattctcctgcctcagcctcctaagtagctgggattacaggggtgcaccaccatacccagctaatttttgtatttttagtagagatgaggtttcccccttgttggccacgctggtctccagctcctaatctcaagtgatctgcctgccttggcctcccagaatgctggggttacaggtgtgagccacagcacccagccctgattttttttaatgtaaatactgtatgaacccagacaaatgttctgccaggccagtgctgcatggctcaccacgtggtggccctgagaatgggcctcatcgacctgcctctactgggagtgtaattaaccagggccccagctgctgcgctggggaatccatatgcttccttccatgaggtgctcctggctaatgactgagcatggcagggacactaaagcagacccctccccgggagacacaggattcccctgtccccggctttggcttagggacttccctatggtgttcgcaccctaacttttttctcctctctcttttactcagagtcagacttgcattactgtctcaggttctcccagctttatgtggcaccttctttgctttctctcaagggcatttcccttaataaaaatcacatatgtgtaatcctgtatgggagtttgtttctcagaactgggctgacacaccatcttgcaaactctgctttcggcattcagctcacacttacttacaccctccaaactccaactatttagggctaattccattccagctcccacccgttgaatcccttcccccctccccctgcttcctcctcccattctgctttcctggaaacagcatttccacttacttttgaacaatggtccttccttcactgttcattcatggagtttggatagcaccatcttctaaagctagggctgagcacatgatcaggactgactaatcaccctcttctacttccttagccacaataattcgttcagagatgggcacctgactcttacaatgcaatgagagtcagcttcttatgccagtgcttttggcaaaggtaagttcattttcccctgggattactaagctggtaggaggtaagtcagcagctgctgatggcataagaaaagggcctgataatgaagccaacatggatgaaaagagagctgagaagtagagatcagacagatttcaaagcatatcatttaagcatctggatccagccatacttgaagtccagtctatctgtgggctttgaagttgcatggaacaatagcaagatgtagctgagagagttttggctaatataccacctcacctctcattcagtttcatggaatataacagacattgccaactaaaatttacaaacagcattgatataaaagctccgccatttaaaaaaggaaactttctattctttcactgtgtggccttgggaaatttctaatccgttctgaacttcagcttttttccctctcaaatgtagcaaatacaacataacttgcttgccatggagggaaatcagatgcccttatctaggaaagtaaagatagaggtataaaacattgttatttcaaaaaaaaaaaaaaaaatccagcacataagtctaggagcattgaacaagggtcagattgcatggattcagattccagctccattactaactggctgtgtgaccttggacaactcaattgacctctctggccctcagtttccttatcagtaagacggaaactccaatcatatctattgcacgggatagttgtagaaattaatagatacataagtgcttagtgcaacatgtggcactcaaaatatgtgtggtatgattgttattgacacaatgtttgacccatgaatgattgtgatgccaaccccctcacagttggaaatccacctataacttttgactcccccaaaacgtagctactaatagcctattgttgaccagaagtcttaccaataacacaaacaatagacacatatgttgtattttagatgattatacactgtattcttacaataaaataagccagagaaaacaatatatgattaagaaaatcataaggaagagaaaatgtatttgttattcattaagtggaagtggatcatcataaacgtcttcatcctcattgtcttcacattgaggagactgaggaagaggaggaagaggaggaattggttttgccgtctcagaggtggcaaaaacagaaaaaaatccatgtataagtggacccatgtggttcaaatccatgttgttcaagggccaactgtatttatattacaataaatgctgttaatgttgtcactgttgacccttctattccattcccagcatcacttcctatgcccagtggaaaattccatcttaaaatcacccagcccaagccctcttcagtagactcagatagatggcttgtcaagggcatgacttaacttctccaaacacaaccagcccagtttcaactgccatttggggaactttcccaattaccacatttccgcacgtcaagtatgaattactttaattgccccagaagaacgcactgttgaaacatttgacttgcccagaactaattgtctgtcaaaaagatattttgcagccaagctgatctcttaattggacatctaatttaactgaaaacctttttccctgcttgttttatgctttcttctcctgtttttgccaaattctggatgctgggcactgctttcagaaataatttatcttgttattttctattataaaagtaatacatgttcattatagaaaaactgaaaaaaaaaattccacatgaagaaaaacagtggatcctagactcattgcccagaggaggactatgaacattccacatgaagaaaaacagtggctcctagactcattgcccagaggaagactatgaacattccaaatgaagaaaaacagtggctcctagactcattgcccagaggaagactatgaacattccaaatgaagaaaaacagtggctcctagactcattgcccagaggaagactattaacattccacatgaagaaaaacagtggctcctagactcattgcccagaggaggactatgaatattccacatgaagaaaaacagtggctcctagactcattgcccagaggaagactatgaacattccaaatgaagaaaaacagtggctcctagactcattgcccagaggaagactatgaacattccaaatgaagaaaaacagtggattctagactcattgcccagagaaagactatgaacattccaaatgaagaaaaacagtggatcctagactcactgcccagaggaggactatgaacattccaaatgaagaaaaacagtggatcctagactcattgcccagagaaagactatgaacattccaaatgaagaaaaacagtggatcctagactcactgcccagaggaggactatgaacatcttagcaagtctcccctcaggttgtcctagaatagatgtctctacgtagttaataaaaacatacattcaagttttgcagctttttgttccactttacattttaagttgaacgtttacacttcccattccaagatcttcagaaacatgtttagaaacagaagaatatcccaacaacagtctgtttaacctcttcccctaatgctgaactattgttgctttaagcatacattttctgtgtgtgtttcagatgtagtttccttaggaaagattctctatgctgtgcaacaattccccatgtgtctcttacatttctgcacatcttgtgtcagcatttgttctagaccgtctttataaggatgtttgtatagctaatagcattggaagatagggctaatatagtagaagacagatttatttgctgattaggattataataataatatctccggaccaggcgcagtggctcatgcctgtaatcccaccaatttgtgaggctgaggcaggcagatgacctgaggttgggagttcgagaccagcctggctaatatggtgaaacccccgtctctactacaaacacttaaaaaattagctgggtgtggtggtgggtgcctgtaatcccagctacttgggagacaggtgggagaattgcttgaacccaagaggcaggggttgcaatgagctaagatcataccactgcactccaacatgggtgtgacagagcaagactctacctcaaaaaaaacaaaaaacaaaaaaagaagaagaaaaagaaaaagaaaggattataatgacaatgtctccctccatccagggtaaaggttgaaaagaccaagattcctaaacttggggttcctcaggtgtgatgcaaatccactgcaggcacagattctacctggatccatccgtgtattactcatttctcacactgctaataaaaacatacccaaggctggatgtggtgtctcacacctgtaatcctaacaccttgggaggccgaggtgggcagattgcctgagctcaggagtttgagaccagcctgggcaacatggtgaaacctcatctctactaaaatacaaaaaattagccaggcattgtggtgcacacctataatcctagctactcaggaggctgaggtgggagaatcgcttgaacccgggaggtggaggttgcagtgagccaagaatgcgccactgcactccagcctgggcgacagagtgagattctgtctcaaaaaaagaaaaaaaaaaaggctaggcatggctgtaatctcagcactttgggatgctgaggtgggcagatcacctgaggtcaggagttcaagaccagcctgaccaacatggagaaatcccatctgtactaaatatacaaaattagctgggtgtggtggtacatgcctgtaatcccagctactcaggaggctgaggcaggacaattgcttgaacttgggaggcagaggttggggtgagctgagatcctgccattgcactccagcctgggcgacaagagtgaaactctgtctcaaaaaaaacaaaaaaacaaacaaacaaaaaacataccctagactgagtaatttataaaggaaagagatttaattgactcagggaggcctcgggaaacttacaatcatggcagaagggaaagcaaacatgtccttcttcacatggcggcagaaaggggaagaatgagcaaaagaagaaaaagccccgtataaaaccatcagattttgtgagaactcattcactatcataagaacagcatgaagataactgcccccatgattaaattacctcccactgggtcccttccatgacacatggggattgtgggaactacaattcaagatgagatttgggtggggacacagccaaaccatgtcaacctgtgtcacccttgagggacttgggggtcaaagggaactggtgcagacatgaagctcaagcttcctgttgtgccatgaaaaataaagtcctttatctctcaatccagagtctcatgtcttctgcccacatccataaaactcgctagcctccatgtaggataatatcttagaccagcacagttcttgacactctagaagtgaatttgttggatcaaaaagcatgaacaattgctaaaactcttaatatgtcttgtcaattagctctccaaacaaatatgagtcattgcctgaaatctcttttgtcctcaggaagggatagagctgcttgactcagatctctcaggtggccttagactgtaatgtcttcctttcgtgcagagctcttaccatcctaagccactacacctacctaatattctataaaaagctttttctccctacccagtgtctccaatgagctgactttcttttctggattactcttttatgtaataaaaagtagacatgagggtcaaacagaaagggaaaaaggggaatttgtttaatttctaccaagtgccaggcatagtacaaagaacatttagataaggcagaaggcattaattatttttatctacccagaacccactgccccacctaagcaccccagcccctgacctggccacgtgggtggctatgtgacctgagctgaaccaatcagagtccttccctgggatttttttcacatcataaccacatgagaaggtctcccattatgaaacagagaagcttgttggcagccatggttctagccaaggatggaaaaaacaaccaaaaaaagaaaagaaacaaaaaaaacccaccatggtaaaaaaatacatatataaaaataaaaaagatatgaaagacagacagacatggggaatggtctctttccagttgcccctgccactcaactgctctcctaccttcctggatttggttatgagagtcaataaattatccccttttattgcctaaatgacttccatatgagtttctgctccttgcaaccaacataatcttgacaattaatagtagctagcattttgtgagtgtttactgtgccatgcccattaatacacctaatcctctctacaattggacaggtaaggtgcttttagtaacctccaatgtacaaaaaggaaaacaagttgggtgaagtgaaatgacttgctcacagtcgctgggctaacaagggggcagagtcaaagtttaaagccagagcccatactcttccctattgtataacacagacatgctgtctctgttcccagtgctggggaatgcagagaactggggactgaaggaagagcaggcgttcaggtaagcattaatcaggggaccttccacaagggaaaagggagtactggcccagttgaagtccagccagcactcagcatggtcaaggatggggtggtgctctctccagccattcaaggtgctgagaaaagaacagaactttcatctgaggaatacaagccttttaaattattaggcccagagaggcaatagaacgagatagcaatcatgtcctacataccccctttgagctcggtattcatttcttaaaactgcttgccattgccacaagtagctataaattaatctaataatgccccactggatgctataacccacacctcatagcttaacaatgtatagccaatcactcgtcaatgttatttctgaaaaccagtgagaattcctggcaaccaactgtgtaccagcccactccatgtcccccttttttgcctttataaatccacttgtaactgctgctaattggagtgtatattcagggaaacttgaatctatgctccctggctacagtcctcaagcttggcccaaacagagtctttacttatattaattttgcctcagcttcttccttttaggttgacagtgctacaggctgaattatgtccccctaaaattcaaatttgaataaatgttcaaatatgaatttgaggccaggcacagtggctcatgcctgtaatcccagtactctgggaggccgaggtgggcagatcatcttaggtcagcagtttgagaccagcctggccaacatggcgaaaccccatctctactaaaaatacaaaaattagccaggtgtggtgacgcatgcctatcatcccagctacttgggaggccaggataggagaatcacttgaacctgggaggtggaagtggcagtgagccaagatcgcaccactgcactccagcctaggcgacagaacgagactgtctctctctctctctctctctctctctctctctctctctatatatatatatatatatatatatatatatgaatttgaagcccttcaaccatatggatcatatcttgaagccctaaccccctagcacctcagactgtcactgtatttggagataggggcttgaaataggtgattaagtttaaacctatttagctcatttagggtgagctctaatccaaccagactcatgttgttataggaagaggagattaggacacacagagagacaccagggatggacaggcacagaggaaagaccatctgaggacacaccagaatcgaccatctgcaagccaagaggaggtctttggaggaaccaaccctgctgacaccctgatctcagacttccagcctccagaattgtgagaaaattaatctctgtcatttaagccacccagtctgtagtactttgttatggcagctccagcaaactatatctacaggaatccatcaccacttatgacaggctctgccacatagtaggtgtgtgtgcacacaccacacacaaacatgtttagaatatgaaatccgtgaaccctactcccacactgataacagttcaggaacagttgattttccctcagggaatctggtttgttttcctagtttccatcccatcaagaccccttcccacctgctgggaaatacttgcctgaacccctcgttcctttcacaacacacacctgatggtaggaagaagcttccaactctgatattgacagggtgcttgtaacctagcaccctttctcctaccttgttatggaaaaataaatcctttatcctatttcaactacagtcttggcaaaggaaaaaacaaaacaaaaaaggaaaccagcctagaaatggaaaccaaagatcatgaacagtgctatgctgagttacagctaagggttggcctttctggagctggctgccttcagatggcagggctctgagtgtgtgtgtgtgtgtgtgtgtgtgtgtgtgtgccagaagcacaagatgacacaccctgtggtggggtcaggcaagctgattgtgggaaaggtgggaacagaatattttacaacaatgttggaaaaatgggtttacattctctgagaggaagatacccaaagcttcaagctcacctcaagggaaaattgagctaggtttccatgctctccacttggatctcacgcacatgaacacacatacaaccttctcctcaatattcacaagaggcctctgttgtctgcttctccagagagcggaggtgaatttacctgaagctaatgaggcttgggcttcagggtcttttccttgtacctgtctctttaaatgctggacttggggaaggctttaggtgagaagggaaagctgggtttcaataatgaagcacctctatgttcacatttctgattaattgcctacacagatcccagaagaatggaatggaaatagctaaaggctccagaattttctctttttatttttttgagacaacatctcactctgttacccccaggctggaggctggagtgtggtggcaagatcatcgctcactgcagcctctaactccctggctcaagcgatcctcccacctcggcctcctgagtagctgggactacaggcacacaccaccacacctggctaattttttgaattttttttttttgtagagatgggggtcttgccatgttgcttaggctggtcttgaactcctgggctcaagaaatcctcctaccttggcgtctcaaaaagctgggattacaggcatgagctaccatgtccaggcagctacaggaatattatacttaatttctcattccaaaataacattctcttttgtgcctaattttaaattcataattttgtattctttttcttaaacagagatccccatattataaaagcttcagtccccacaaaaactggatctggttctgccaaaatgatatatcctttatgatatttatagagacgttctgattatttctgaacatctcagactttctggaaccaagacaggttcgattatgaacatctgttgtctaattttaaagaccaagggggaagccgggtccttatgagggccataaaggctccaagctagatggatattgggggagtgggttagcagagatgtcctaaaacaatgaattacactaatgggaagaacaaaaggtaagtctaatcacagatgtcttggttttcaagctagtcagacttcagataactgtcaaatcttcagccataaatcgaaagtggaggagaattaaagatccatccttgtttgcttacagaatttacttaatttagccactctatccttaattgatagcaacaggttttttcaaaatagtcaaagtaatctatgctttgctacataatagcaaaagtaatagccaacattcatcaacacctactatgttatacccttgacagggtttcctattttagtagtcaaagcaatttcatggagtagcaattacagttgtaatttcactagtgagaatgcagagtgaggctcagagaggttaaggaacttacccaaggtcacacagctagtgagtggagagttggaatttcatctctctgattttaaagtctgggccctttcctctactgtctctctctgaactcaatgacacatcctaagtaagtaagggcttctacacaggatgtgttagactatgctgcagtaacaaacaacccctggatctcaggaacttaaaacaaaatttcaggctgggtgtggtgtctcacacctgtaatcccagcacattgggaggccaaggccagtggatcacttgaggtcaggagttcgacaccagcctggtcaacatggagaaaccccatctctactaaaaatacaaaaattagccaagcatggtggtgggtacctgtaatcccagctacttgggaggctgaggcatgagaatcacttgaacctgggaggcagaggttgcagtgagccgagatcacaccattgcactccagcctgggcgacagagcgagactctgtctcaaaaaaaaaaaaaaaaaaaaattctagaaataactccaaccttattttcttgaacacgactcatcctgaccctccagcactccattgatctgggctaaatatatggaatcctgcagatgaagacaccagcacccaaagctaatgggacacagaaaacagaggccactcaaataaatgtcagcactcctagttactgaatactctgtgtctggcaagtttcatcattagtcagttattcattcactcaatcaacaactacttactgagttaatatggcagcatggttatgagcacagactctggagcaagaggtcctaggttcaaatcccagttaccctgcttatcagctaaatgacttctcagtgccttggtttctccatccagaaaaatggggattataattaataattgcctacctcattgggttaagtggataaactaagaacagtggcatgcccatatgacatgctctataatttttattatcactgtgtgccaggcattattctatatgatggaggatgcagctatgaatagggcagacaaggtgcctgtctttacagagcttctattctagtgaaggagagaggctttattagcgagtaatccttgatcgagccatacctgaagctaatgccacatccttcaaccttccaatttccccaggcattaagttcttttttcttttctgcctaggctagcttgcactgagtttctctcccttgtgaaccaaagtgtcctgaccagtacagaggtctaaagcctaagctctttccagtctgccccttgcccctttccagctgaagccctattcatttgcacccaacatcatcattgcgtccagtgcctcaccacttggtgagacccttgaatattcaaaccagcgtgtaagcagagagttaggaactataaacagtaaattataacaagcatgaaatggaagcctgctgctgatcattcgcaagagagcaatcaaatctgtcttggtgcctacatgttttatggaaaacatgtctatgttttaaaagtgtttttgaaataaaaaataatttactaactaaattagatttccacatgttttatctagttaacccatcccttatcataagaaacgtaacttctttttttttttttttttttgcgatggagtctcactctatcacccaggctggagtacagtggtgtgatcccggctcactgcaacctctgcctcctgaattcaagtgatgctcctgcctcagcctctcaagtagctgtgattacaggtgtgcgtcaccatgcccagctaatttttataattgtagtagagatggggtttcaccatgttgaccaggctggtcttgaactcctgacctcaagtgatcctcctgccctggcctcccaatcatggtgggattataggcttgagcccctgtgcctggcctagaaagctaacttcttaattgcaagctactttcatcaatataatgcatttgtctcactccttaaaggactcctgtcacagtggattggcaaagaacaggtcagacacaagaggcagtggagtattagtaaaatacacgtggatttggagtcagaccttcctaggtttaaatgctggttttatcgcatactagttgtatgccttcattggggtttcccaagaatcagaccctgagacaagactccaagagtaagtcatctatgtgggaggtaaatgaaacatgacacaggaaatgaaataggtcagggaggcagccagtaaagggcatattataaaacaagttactacttgggacaataactggaaaacttgctggaaaacttgctggaaaactctaggatacagtgtagaacatctctagcaatgtgctggtagatgtttaacaaccaacactgcagaaaaatattaaaagcccagatttgtagtgtctgcccatatccatggtgtaaatcctcccaccatggctgatttcacactaccttgtccctgaacaaggacttggggaaagatgcacataccagctcttgcttcatagttatctgacctaaggggtgagggagatggggtacttatccacatacaccaactctcatcagttcctggtggagggatgctcccagggcaggtgttgattcctccaagacttccaagccatcatacgggtgggcaaagacagtacaaccagaaaaagacctcagaaagagggccaggcatggtggctcacgcctgtaatcccagcactttgggaggccgaggtgggcggatcaggaggtcaggagatcgagaccatcctggctaacacggtgaaaccccgtctctactaaaaatacaaaaaattagccgggcgtagtggcgggcgcctgtagtcccagctactcgggaggctgaggcaggagaatggcgtgaacccgggaggcggagcttgcagtgagccgagatcgcgccactgcactccagcctgggcgacagagcgagactccgtctcaaaaaaaaaaaaaaaaaaaatagctgggcatggtggtgcatgcctgtaattccagctactcaggaggctgaggcaggagaattgcttgaacctgggaggtgggagctgagatcaagccactgcacttcagcctgggcgacagagtgagactccatctcaaaaaaaaaaaagaaaagaaaaagaaaaagtcctcagaaagagaatgcaactacatttggatgggtcagtggatgcttaagaggtaaagggttagaagatacaagggaagcactgaaagcatctgttactctgtgcaattgtgaaaacgttatttcatttctctaggcttccaatattgcattggtaagatatgattcattgaatcttccaacaaatattcatggagcacttagtatatacccagcaatcttcaggccataggaaacagaatgttgagttaccatgacaaagtcactgtcacagagccagtggggaaagcagcctctaaacatgccacccagtaagtaacaaagatcatttcgggaatggtgaggactatgatgttagagagggtgatgggagggagaataatgtagcggagaggacatgaacgggaaaatctttctgaaagggtaacgtgtaaggtgaggctcaacagatgagaggaaatgtgttgtaaaaagatctgggagcagcattccaggtggaggaaactgcatgtgcaaaggcccagaggtgggaaggagcttggcttgttcatggaaaagaatggaagccagtgtgtctagatcaaaatgaatcaggcagaaggtaagcaggtaaccaggaaacagagtggaggggcaggcaggaatcagtgtctgcagtgcgtgctcagcatcataaagggtttgggtagtaacacaaccctgaagagttgttaaatgagctcccatgcatgtaactggcattactcatgttattaacctgggaaactgtcacgtctcttacttttccatttaatctcatgcccatcctctttgctcacaggagccaagaagtccagtatctcactccacatctgccttctcgtggtccaacactctgccgactcagttaatccaaagatcacttccaaacttcaggctgatggaaacctgaggagtcggatccattcataggcagccccattttcaccttcccttgtccccgaggctgccattaggttgaaaaccagtctggtactgtcagcgtgtctttgtctacagctatgaaaaagtccacatagtccagtctctacatagggcacaatgattctcctctacatctcagctaccaggtaccagcttgtcgaacacacatgcaaacattcaaacccttctcaggttcccctctagggccttcagggacttatccggcatacctgaggttggggccattgcaatctattcttagtctagtgttaagccgggtcaacagcggagatgctccttctccttgaactaattttatttccagagtttcattttccttccctgcaacattaggcatcatttggggatatttttatccatccatatggatttcaaaatctcataaagaaggagctgggagaagaatgaggaatcactgattttaatgactgtatttgttgatctcttactccattcctggacccatgttgaataacataaatatatatgcatgtacacatgctatacatggtatctggatgctatatgtgttatatataacatacatgttataatatatgttagatatgtatgtcatacatatcataatatataattatacattgtatattatatattatactattacatataatatataattatacattgtataattatactattacatagtataatatatacttatgtttatataataaaatataatgtatatgaaatatacataatacatatatgatatattatataattatatcatataatatataattatgtatatttcatataccatatattttatcatacataaatatataagttatatataatatataatgtcatatattatataaattataattattatatattatataaaacatatattatatataatacatggtttatatgttatataacatatataacaaattatatattatataacgtgttatataatataacatattatatattatataacgtgttatataacaagttatgtaatatacaatatgttattaaaaagatattacagaatatattaaataatgtatgttttatatattatattatatatgttttttatatattatataatatatatgttttatatatattatttttgttttttttgttttttgggggttttcttgagacagagtcttgctctattgtccaggctgcagtgcagtggtatgatcttggctcacagcaacctccgtctcccgggttcaagcaattctcctgtctcagcctcccaagtagctgggactacaggtgcccacaaccaggcctggctcatttttgtattttctttagaggcaaggtttcaccatgttggccggactggttctcaactcctgaccccaagtgccccgcccaccccatcctcctaaaatgccggaattacaggcatgagccactgcatccagcctatatatgttctttcatcatcaccacatcatctaattttacagatgagaacactgaggcttggggagatattaaatgtcttatccagattgcatgcatgtaagtgacataagcacgatttgaaactaagcaatccaacacgagagtcctaggtctagagcctctctgacctgctttctacctagaaattatctgagttctttatgcaaattgatgcactttttcatccctttggtctcttgaagtggcagcttttgctgcacccagttctcacaacaacttgcaaagaggatcaacacacacgactgatcacgagataaaggaagtctgaagcagtccccaccaaacatgcaaattcaatgaatgaagatccatttcttgcagctttctgctttgtataataacatttggctgtgatgatctattatgacactaatccttgcacagcccagagaagatgggcaatagttttctggatgtcagtgggactctggcacaagggccagccaattttggtgagcgcaacaggaaattctttgcaatgtccttgtgaatctgaggttacaaagactggctcaatctgtcacaggaagcatgctggaatgcctttgtccttctttctagtttttctttctttctttctaataattctcagtgtgggagaatattattctttctaataattctcggtgtgggcttacatcctttgctttgggaaaggtttctatcattagacctctcttttcccccaaccagccagctgtgaagcggttcactgcggacccaacctctggcatgactgtggatcagcagcaccaatgccatgaagactgcagacacactggagaaccaaggctaattcccttagccattgagcctccgctttccatccatgaaatgactctcaaaatgccagcttgggctattgcttgcttcagagcacctaagagcatctgaacaaaaggaatatctttttcacagatgtaaatgaggaaagcgaggattatacagtagaagaagtgctctataaggctgctgaagatcacaattttttttttttttgagacagtcttgctctgtgtcccaggctggagtgcagtggcgcgatctcggcttactgcaacctccgcctcccaggttcaaacgattctcctacctcagcctcccaagaagctgggataacaggtgtgtgccaccacacctggctaatttttgtattttttagtagaaacagaatttcatcatgttggccagacttgaggtcaggtcttgaactcctgacatcaagtgatccacccgccttggcctcccaaagtgctgggattataggtgtgagccaccgtgcccggcccgaagatcacaattcttatctaactctgctattcattggctgggccaccttgggcatgtccattagctttctggttcttaggaccctcatgtctaataacaaggtctttcctacctgccccacagggctgttgtgaggaccaaatgagatcaagaatgcaaaagctctctgtcaactgtgaaacactaccaggagtaaagattcacaaggcatgagttgccacaaggcagtatagcatggtggttaggaggttaagctcttaaaccagattacttggattccagtataaccccaggatacttaactttgttttgtggtgttgttgttttgttggtgttgttgcttggtattttgtctaattttcagaaacagggtcttgctctgttgcccaggctggagtgcagtgggcatgatcatagttcactgcagccttgaactcctgggcttaagctatcctcctgcctcagcctgtggagtagctgggactacaggtgtgcaccaccgcacctggctaatttatttaatttttgtggagacagggtcttgctttcttgcctcagcttgtctcgaactcctgacctcaagcaatcctcccatcttggcctccaaaagagctgggattataggtgtgagtcactgcgcccagccaatttaaattctttaagtctcagtttttccatttgtaaaatgggcatagtaatagtacatttgtcacagagttggtttgtgataggataaggtgatgcatgttcactagaaatgaagagagaagggttatgattcattgaaaagaaagaaaaacctaggctgggtgtagtggctcacacctgtaatcccagcactttgggaggctgaggcaggaggatgaattgaggacagaagttctagaccagactaggcaacatagtgagaccctgtttctactaaataaataaataaataagccaggcatggtggcatgaaccctgcagtccaagctactcagaaggctaaggcaggaggatcacctgagctcaggaacttgaggctgcagtgagttataattgtgccactacactccagtatgggtgacagactgagatcttgtctctataaagaaaaaaagaagaagaggaggtagaagaagaaagtctgaactactccctgcaggaagagtagacaaggtaaagagccctagaaaagattcgtccccgtgctttcctctagaatgaggactccagtaatttataccagtgctggagcacaggcttgacaatggctggagctcagcctccacagtatctgctgtgattagtgctcaaaagcataaagcataactggaactaagaagaaacaagatgctcaaggtctccccttcagccttccttccaagtaacagaatcatgatttgatgatttgaccccttcttctaccacctcaatattgaaatctgtttccaattcccattaccttagagaacaccatcagatgtccattgtatatctcagattcatttctgtccaaaaacgaatttaacttgccttccaaataattttactcctaatttttagctcactttctccatgaatatcatcgccattcacccagttacccaaaccaagagcccgaacaacatctttgagtccttctccatcacaccctacattcaaccaattgccaccttctcttttatatacctccttaagtcacggccttaatttgggaatgatcgtttctcatttggacttgacttcatggtcaaatatggcatccagagatctagccattgcatcctaattcaagaccaacaacaggaaaaatgggcaaagaaatatatggtcctcattctgagaaaatgtccatattactcttctctttgcattccttggccaaagctaattcacatggcttgggtagcttcatgagagactgggaaattagagggttttggttttgttgttgttgtttaaagcagagtctatgtcaccctaattaaaatcagtgtttcatcttttattcttcctcaaatattctgtgttaaagtcactaaagggcaccaaccaaagtaagcatcaatgagaggggataggacagagatctggcatggggtgttgaagcctagaattggtgcacgacctagttctagtcacgaaaaagcatcagacaatccccaattgagagctcttatacaacataaatggcctgtatcttcaaaagtatcaaggtcgagaaagtaacaaagagactgatgaatctgccggaataagacgtgacaattaaatgctatgataatcttgccctgcaagattataaaggacattattgggatggtcagtgaaacctgaatggggcctttggattagatggtggtaatgtatcaatgttataataatttcctgactttaatggtcgtattatgggcatataggagaaggtccttattgcaagaaacacacagtaaagtattgggaaatgattcgaggagagggaaaacttaattgtactgttcttccaactattgtctcagtttgaaatttttcccccgaaaataaggtgttatttcagagaagaaaagggaatgtagatgtttcaatatgtaaatagtagactccaccacagatggtatttaaataatgtatcagaagaggtcatcccaagggagtaatatttaaatccagagccaaagagagaaagccatccacgtgaagagcaaggagacaaagttttcaggcagaaggaacatgtgagaagtagctgaacttgttttcagagttataaccctagcaatatggtggaaaataacaaataactagcaatgtggttgaaataaacaaactgctattccttcagaaacatgagtaagcaccactgtgtgcaggaacttgcagcagtcagctagatgctgtaagacaaacaaccccaaatcccagaaagagcttatttctctgccatgcccatatagcttggctggagcagctctgctggaggttgcaggtctgaagacatgctggggcggctctgctctagatgcatctcatttttctaggaccagtgaccaactaagtcatgtttttctcatagagaaggcaaaagcacaagaaggcaaactcatcacacgagagcatttcaagcctttcataagggttatgtcctctcacatcccattagccaaagaaagttaagctcaactcaacagttgaagggtagggaagtacactatgccatctctcagggaaaaggaagtcacatagcctagctgaacatcaatgatgtaataggagagggaacaaatatttactaaacaatagtctcatctaccgtaaagctcaaatacttcacaaaagagccacccttagaaatagcttttatctcatctattttatgggtgagtggggaagaaggatgacaaagcccctttaagaattttatataccctagacacattcacttttggaggtctcaccagaaagcatttgaaacatgctacaaatttgcctgtatcctacattaaatggatttttggctctaaacattttttgagaaaattttaaaattctgctcctgaaattatctggcaataggtgatttatttaaatttagattggatgtgatttcttggtaattgtgcatattcaggaggtctagaaagtgggaaattctaactatccacatttttcagatgtaatgaaatccctaggaatgttaaatttaacaattagtgatattgacaaagcagcacaatttgtaggtaatttttttttttttttttttagaaggagtttcactcttgttgcccaggctggagtgcaatggcatgatctcggctcactgccacctccacctcccaggttcaagcaattctcctgtctcagcctcctgagtagctgggattacaggtttacaggcatgcaccaccataccaagctcattttcatatttttagtagagacagggtttcaccatgttggtcagcctggtctcgaactcctgacctcaggtgatctgcctgcctcagcctcccaaagtgctgggattacagtcgtgagccaccatgcccagcgtaggtaatttttaagatattcattaatttcaattttgtcattttctcttttgcatttttaagccaatgtgtgtgtgtgtatgtgtgtttgtgtggtgtgtttgtttgtttgtttgtttgtttgtttttggtctcaaacatttctgtagatcttgaaaaacgtataggtcccgggaagaccctatgcctaacggattaaaaatgcacatgttgcctggaatcaaagctaattattattggttgggaaatggataccctcccactccagactcctcagcacaggaaaataagagcagctaactccaacagaacccaattcatttaggaggctctctgcctctgcataagggtgaatggtttgggattgctgctcagcagagcccttcatctcattcacgaagccattcacactgtatccagtccatttgtaaggcaaataaaaatgtcgtcttccaatcttggctcatttcatcttataagaaaagtctcccgtccgatgcctagccaacatttccctgttgtgattaaagaaacagcaggtaataaaagctggactagcggttggtcctctaaggaccaaaatatggttgaagaagcaataacttaccccagtgcccccaaggcaagttgtctcaataatgtaacaaagctatacttaatggcaacagagcacgtttcactgatactacaccgtaaactgcccgctttcaattagttgcatatgtattaaagggagtcaacacatatttacagcaatcatttctatgtatacaagatgccacaaaaatgtagctttctgctccttctggtcatctggccacataggaataatcaccaaccatagatgcaattctggaaaagtcattaatgctcatctctatggttgcaagagattattgggcttctatttcatgccaaggcactttacatatgtaaataatggtgcatgctttgaatgaagtcatgtttttgtgacctacaatccccactggctgctgcagcacctggcacatattagccactcaagaaattctcgttgagtgaataaatgaaacattcaatggctctgagagcctacctttcagattatcagcaccatgaccctgcttttgagacccctactctctctcccttccctattatctcttggtgaatattggggaatggctcacctgaactgccccacgatttcatgcctctgttttcgccattacctgtcaccttacctggccacagtcattccttccaaagccactattcacatctctatcagatgctctgcagttctggggctcctgcctcttgggacaaggctagtactgtcataccaggtgtgatggttaatattgagtgtcaacttgattggatcgaagggggcaaagtattgatcctgggtgcgtctgtgaggatgttgctaaaggagatttacacttgagtcagtggactgggagaggcagacccaccctcaatctgggtgggtaccatctaatcagctgccagcatggctagaataaagcaggcagaagttggaaagaacagacttactgagtcttctggccttcatctttctcctgtgctgtatgcttcctgccctggaatattggactccaagttcttcagcttttggactcttggacttacaccagtggtttgccaggggctctcaagcctttggccacagaatgaacgctgcactgctggcttccctacttttgaggttttgggactcagactggtttccttgctcctcagcttgcagatggcctattgtgggacttcaccttgtgaccgtgtgagtcagtacccctgaataaactcccctttgtatatacatctatcctattagttctgtccctccacagaaccctgtgtaatacaccaggccagcagaagggagacatttgctttcctggacattttctgttcattttacatttgctcaatgaaaaaaatcaggttgcaatacatatataaatagaaaacacagaaagacataaatattttttaaaaagaatcagaaacatatgccccaaaatgctaatatgattacatccgggtggttaatatttattttctgtttctattctctttttgtttccccaaatttgcttgttgacagaacatgtgcattgcttttggccaataaatgtttggcttatttaaagagttatcttgatgatagccaggtgtggtggctcacacttgtaatcccagaactttgggatgccaaggtgagcagatcacctgaggtcaggagttcgagaccagcctggccaacatggtgaaaccccatctctattaaaaatacaaaaatcagtctatcttaaaaaaaaaattagctaggtgtggtggcacgtgcctgtaatcccagctactcaggaggctgagagatgagaattgcttgaacctgagtggcggaggttgcagtgagccaagatcatgccactgcactccagcctgagcaacagagcgagactctgtctcgattaaacacacaaacacacacacacacacacagttatcttgatggcagttcaggaacttgggagatgagggctgttctcctaaaaccctataagaaccctcaggtgggttatgccacccattcactaatatcccatttacgggtgaagggaaaggtggaggagaccaaccaacccaccagcagtggcctcagtctcaaataaaacttagtccctgagttagaagccaacttaaccatggagaggaaagagttcatcagatgggactaaacctgctcacttccttccaagaaccaccccaagggttcatttcccaggcaccaggagccacccagctccaacatgctgttttctgtcttctggtgacttatcacttgttgtttcttcaagaataagccttcgttgttccaagtaaacatctcaaatgcacacattcttaaagtagtaagtcatgtatccacctgtgcatccaacaaattattatgtagtgaacacccatgagggacgtgctgctgtgttcaatgctggggacaccacagggggccacccacggacttggttcctgccatcatggagctctcggtccagtggaggaattagacatgaaccaaataaaacacagtcatgaatgtaaaaccagaaactagagtaagtgctcttgaaactgccttagcaaaattatgactgagacagtgaaagagatttaacttgatcaattccatcttgcttctaacctccaagctgtccttattcattcttgggtgtaggctgacctaactttgggagaaactgagttcatggttcatagtttgtagtttaaagcaaagatgataacagccctttcccaaagcagacctccttcttgcctggggactagattgcctttgttaggactaaaatgagccacaagattagaaactatggtttaggagtcaggcggctggaggttacaagattctgaccctccctaaactgttcctaagatcagtgcttgagataatttgcagaccctgcacgtgacgggtcaggtggcaccacccagatcgatcaactggctcatctgatcttgtggccccaacccaggaactgactcagcgcaagaggacagcttcgactccctatgatttcttccctgaccaatctgcactcctggctcactggcttcaactaaccacccctaccaagctgttcttaaaaactctgctccccaaatgcttgtggagactgatttgagtgataatcaaactccagtctcccacaatgcccctctgcatgaattactctctctgtattccaatccccctgtcttgataaatcagctctgtctaggcagcgggcaaggtggacccaatgggcggtcacactctgtcgagaaggaacacagggagttgcggaaggcttccagaggaagtgcctgggctttgaagaatgagcaggcattaagtgggcaaaagagcatgtgcaagggtactgtgcaatgtgtcaccacccagggagagaggagaagtggactatgaggctggggacataaacacggtcctggccatggagggccttgtaaaccccatgaaggatgtttgctctttatcctaatatcaacatgaagtgattagaaggtagcaagcccttgattaaccaacaattctagatccttctccaaacttctcttttagggaaaggaaacctagaagtcaaaacataaggtggtgggatttcagttgaaaaggtgtccagggtcggcctcgggtcagtctatctttgggtctatcacaaacactatattaattgcccctattaatctttcattatgtgccaggcattgtgatgatgtatactttatatccattggcacatgtaagcctcaccacaagatttagggcctatcattatgcccatttcacagatgaggaaactgaggttcaggggggcttgtaacatgtcccaaatggtgtagctagtaagtggcaatgccgaggctcaaatccctccaaagattctctctccaaaggtcattttcctttccctaagccatgctggtgcatctggggtcctggaaactaggagatgattttcagaattataagacttaggtcgtgcaagcttcttaatcatcaaagaaagtctggaaagagaagaagatgtttgcaggaagctgccacagaagagaacattttagacagaggaacagcatgaagaaccgaacacacgtggcatcccctaggggccatgaatatagcagggaggcaaccacagagttgggaagatccagagagaggcgggacagatacagtgggtcctgaaagtatgttaaataaagtcacagtgacacggcaatcaggagtggcaagggagccacagacacacatgattagacacaaaaatcatgttttcaaggcacagcccacttagagatcacagcaagatgctttatccaacctccgccggcaatcagagcttgaaaaaggagcattgtcgtcaatcaacttccctttgggcaaaagacacaggcaaaggagaagatacttcacccaccttttaataaatgtgtcttgaggagagagttggcccacatagtacagtctccaagatctaagactccacatgggtagtggcaggggagacaatgggaaccaacaggacattggctggaatcacaagtcacaccttcagtaaaccagaggagtcatttctctctcccttattgactctgggccctggagaaatgccacagaaattcatgagaagaggagttgaaggtagacggcacctggacattatttctgccagcccatttgagttcatctggtaaacattttgcatttggaagttgacatcgtttaataataactgtcaatgtcaatgatcaatgccatcataatggcacaaatacccttgtgggcttggggttgggaggggtacggtggggactgacttctttgtctcctgtcctttcaatggttataaataatgatgataataatttctatttgtgtagctttgtgattgcagagagctttaggcttcctgagagctttcacctatattacctcagctgatccctctacaatgtgcagtatctattttggtcccctctgggaacctgaggcttgacaaggtcaggaaaggccacaccatggcctgttcctgaaacaggaaccacaaatgaaaatccttgcagagagtccaggcagataacataagtgaagaaagggaggaatgagaagcagtagggaatggtggggtctgtggtgaattggagtgcatgcctcattgaaagacgggggtagctgcctatcttgtatccaccaactgtctccacgtgggaacatgggcccaatgctgtcagagcttctaataaattaagaggagctaaaagccagatgctatgtcagtctcccagtttttaaatgatcgcaactgggagtcttgcaactctgtctcccaggctgtaaggcagtggcacaatcctagctcactgcagcctcgaaaccctaggctccaaagatcctcctgcctcagactaccgattagctcgaactacaggcatgtgtcaccatgcgtggctagttttcacaatgtttgtagaaatggggccatctcactatgttgcccaggctggtctcaaactcctgggctcaagcaatcctccctgctcagcttcccaattagctagaactacaggtgtgcaccaccacacctggctacaaactctccttgtcaccccctgttgataggtctctttccttcacaggctgagacaactccaattcaactctgaatccccaatacaggacctgcccagggaacagggctcagacatttatgctgggaaatactcagcttttggggctcagcgtccttttctgcaaaaagagttcccctcccaagaggaaatcccctaagcctaaggacaggaggtgatggaaagatggatggatgggcagatagatggatggaaaaaaaatggacagttggaaacagacaaacttggtggatgagcagaaataagcctcattctcgcctaacaacgggacagcctgggggaggggtgggacacaccaaggctcccagttgacccccagcaattggacaagagagtttataaaccagcattggggttttaggagcattgtaagctgcagagtgcatggggtcttcagtgggaagcatctccttccccatccctgttctctgtcctggggttgcccatcaagctaatcacatgtccacccctggggtccctctggcctctgccactcttcaccaaagtacagttaaactccaggggcaaatgatgtgttgggggtgtggcagacagggattgtgtctcagcagagagggcacagcactcacaaaatagcttcaatagttccagggtcagtagatgtgcccgaagaggaaccccacatcgcaagtggcctaagcctggggtagggtgagcactgctcactcctgcccagaggagtagctgaggggcctaagctctagctctgagcccaccagccattccatccaccacccacctgaaactgttctgttgacccacagcaattggtcctggtgccaggcacagaacagatgctcaaaagatatggttgattctgtctgggtgcagtggctcacgcctgtaaacccagcactttgcgaggctgggatgggaggattgctggaggccaggagttcaagaccagcctgggcaacatagtgagatccctatctctataaaaataaaaattagctgagcatgatggtgtgcgcctgtagttccagctactcgggagactgaggtggaaggatagtctgagccaggagttcgaggctgcagtgagctacgatcatgacactacactccagcctgggagacacagcaagaccctatttaaaaaaaaaaatggtatggttaatctgcctttactgattacaaatcaataaatttgtattatcgtaataaatctgtctttattgattacaaggcactttctcatcccccatcacctaagacaactgcataaagaccgcatgagctataaagaccatttccttgccccaggtcacacggaggaaaagagacagagccaggatttaaacccctgcccctggctttcattcctttgctgtgtccctgcagacccgaggcccacctgggtgaagaacaggtgggtggacattggcagtgttcaccaggggaagcatgccaggtgcaaggaaacatgtgagcacctgtccgtgcccaatgggtctctgtttgtctccctgcatcttcacccaaaccagcttctcacacccccacggccaccaccaccactccaggcctctacctgggccctttaatgccccttccccattcctcaagagcccactggggtcccttccctgatggcctgctggcctcctgcctccctccctgacctcagcctcctcggattttcaacagcctggggttgcaggctgagctcagcatctggcaggggcctggaagaaatgacctctagagggcccacactctctgggtgtcatattttggggctattatcacaaaataccttagactgggtaatttataaatgacagaagtgtgttgctcacagttctggaggctgggatgtcccagatcaaggcacctgcagattcagtgcctggtgaggagggctcactctgcatcataggtggtaccttgttgccgtgtccttatatggcaaaagaggcaaaggcgcttgctcaagccccttttataaaagggggcactaatcccattcatgaaggtggattcctcatgaattagtcacttcctaaggggcccctcttactactatcacattgggtattaagttccaacatatgaattcaaggggaacaatgacattcagaccatagcaccagacgtctatctggggaagcccccaaatatttgtctttttttttttttggaggcagggtctgcctctgtcattcaggctggagtgcaatggtacaatcacagctcactgcagctttgaactcctgggctcaagtgatcctcctatctcagcctccccagtagctaggaccacagatgtgcactaccacatccgactatttttttattttagtttttttgtagagacagagtctcaccatgttgcccaggctgatctcgaactcctgaccccaagcaatcctcccaccacctcagcctcccaaagtgctgggatcacgagtgtgagccatcatgcccagccagccccctcatatttgatccaggcattaagcctcctggcaagaccagcagctccctgcccctgaggcagggctgagtttcagaagctgcttttcattctcagactatgctgagcctggtactgtgcacacagcacatctgaactttgttcaacatatccctgcatcaacctggcaggacggcctcaggccagggaggaaccggggagatgatgtgggatgagaagagagatcagacagaggctgtctagacacagtttcctggcaaagtcaccaagagccctgcgagcagctgtccacacctcctggcactctctgtatctgtcccgtccctgccagctccccacccgcccagtgcttcaccagctcacccctcagacactgtccaggtgggaaccattcccctcaactccctccagaacaaccagatggcacctgccagcagccctgggagccagaatcccacccacctgacccaagggctctatctgatctcagcctaacccatgaatcaggccctttggagagccaaaggaaaattgggcttccctgccagctgactatgtgacagttcagatgtcccagagcacaggaaagaggcagagacagggtcgtgaggagcccttgcttctccttcaacatctcccataaacagctggagaggggctctcacagggtccatgggaagagaccaaggaggggcatggaggagaggggagggctgagaagaccagggtgaaatggatgaggagaaggaagcagatggcagggaccctcccatctcccacatgggcccccttaggtgctactggccttgtgcaaatttgcacactcacattcacacatttctgtctgcttctctccaatcgttcagatacctagcacacaccccagcctctagaatcaggtagtcagtctagcagagtctttagcatttgacttctgggtttaaatcctggctttagcacttcctagcttcacggccctgtttaggcagtttagatgcctccctgagcttcccaggttttggggaggaataaatggcatagcagatggggaacatctagcactgtcctgctatatcatagactgtgaaagatcactgtttttgtactattggccttgctttgtagtaattatcattaacttttttttgagataaggtctcactctgtctcccagcctagtgtgatcatagttcactgccacctcgatctcccgggcttaagtgatcctcccacctcagcctcccaagtagctgggactacaggcacacaccaccacacttggctaatctctctccttttttttttttttttttttttttttttagagaccgggtctcattatgttgcccaggctggcctcccaaagtgctagaattacaggtgtgagccactgcacacggcctactttgtaataataacaaacaatacagccgctactttttggtagtttcaaaccatgatcccagaattttttgattcatcaaaaggtagaacctatgtcatctaccgttgaatccagactgtgcgattgcttgaccaatagaatatagaagaaacgttatgcgacatccaaggctacatcataaaatgtgacagagcttccactgggttctccttgtcttagagctcagccaccatacgatgaggaagcccaagtagctgaagagaggagaggcccaaacaaaggaaccaagtcccctggaccacagcctagctgagctcccagccaaccagaaagcgccaacttagcaaccgctagaggagccatctcagaaatgaattctgcagccccctggtgagctccagctgatgccacgtggagcaggaacgaactgtcccctcaacatcctgcccaaattgtggatgtgtgagcaaaataaatgactgtcatgttttaagctactacatgttgggtggtttgttgcacagccatagacaactggatgacaaacacatatctgacgctttatccgtcattgccatgctaagctgcagatatttttgtaatctacacgtttagaccttttccagcttttagagctcacacttcccttcagtacacctgcaagctccctgaattcattttcatgtaatcctccacttttttccttcagccggttcatgttaggtttctctcatagcccctaaacacagtgctcaaataccaataacctggatcccatcttgcggctctgcaggaagctgtttttgcacaaggttcttccacatttctgggaaccaggagatgtctacttcagctacaatctctcctgctcgtcccctgtcccctcgggagggtctggctcagaacagatttcactgtgggacccaagccaacctgttagccactcctaccccaggacgggtgaaacacagtcttgcagtaacaagacttacttttgaaggatggaattacaatatggaaaaaatacaacttcacaaggtacacgttcagttcatagcagcagccaagactttgaaggaagagttcaagtcgccacaaaaacatagcagagggaatagtacggattttagagccagatagtactggagacttggagactgcagggctgggagggtcacagacagtcctgagttcaaatctccactccaccactcattgcccacgtgaacttgagcaagttatttaacctctctgagcctccatttcctcaaaggcaaattggggataataaacccagtgtttgtgaggatagataggatgcatattctgctcgtggttgtgccaaccaaggacacattcagagtaaattcaagactcttcttgaagagtcacgagcacagtggcccatggcagtaatcccagcactttgggagggtgaggcgggtggatcacttgaggtcaggagctcaagaccagcctggacaacatgttgaaaccttgtctctactaaaaatacaataaattagcagggcgtaggcatgcctgtagtcccagctactcagaagtttgaggcaggacaatcccttgaacctgagagatggaggttgcagccgctgcagtccagccagcctggatgacagagagagactgtctcaaaatacaaataaaataaaataaaaaaagaatgagactcttcctactgcaaaaactgacctctggggggtggaaacaaacaaacaaatgagcaaaaaccattgttcttgcctagctgttaaagaatattgcgttttctcataacttgacacgatacagaaacatacaatgaagaatctggtgggtattgaactgtcaattgcaaaataattattcatcactgcaggtccagcctgttctccgggaaggactgtttgaatgtcctgggcctccaagccaagctcccagagcccagaccgtctctttggctaatgctggctctatctcctgaagaaaatagtttgatgcaaggaagaactttcattatcttttgccctggagcaccagtaactgtctacaaagagcagagcaagggaagaagggcagtgagaaattaatctttgagtttcctccttggtgattcatccatttagaaatgggtagattcagagaagtgtttcttcatccggtccctctgttcccatgatctcaaaaatgaaaaggcagccaaccctgatcaccacccatcagtcagcctcttttcacaagtgggaggcatgggctgtgctggaccaagtgcaaatgcaagacatgtctctaacaggccttctggaaccaggggaagctggtggcttggatgcacccactgtgaggtagagtgttatactgcagcccccataaccctgcacttctccaagtctatgattatttgactctggaatctggtgtagcacatctgctcagttgctcagtcattacttactgagcacttacaatgtgccaggacaggcagggtataaaggattgagaattgaacaaggtagtcaaggtagtatgatccctgccctcaaagagcttgttttagtatatagggtttctcaactttggcaccattgtgggctgaataattctttgttgtggggctgtcctatgtactatatttttttttttttttgagacagagtctcgctctgtcgcccaggctggagtgcggtggcgctatctcagctcactgcaacctctgtctcccgggttcaagtgattttcctgcctcagcctcccgagtagctgagattacaggcaccaaccaccacgcctggctaatttttgtatttttagtagaaacgcggtttcaccgtgttggccagggtggtctcgaactcctgacctcaggtgatccacccacctcggcctcccaaaatattgggattatgggcatgagccaccacgcccggcccactataaaaactttagcagcatccatggcctctatccactagattccaatatcacaccctttctcccaattatgacaaccaaaaatgtctccaagcattttcaaatttcacccgagggtcaaaattcaccccaccccactcctaccattcacgattgagaacctctattccaatgaaagaagcaggcagcttagtggaaagagtgtgagcttcggagccaggtgggcctgggttctcccttccactttattagctgcgtgatctttggggaatcacttctctctcttacgcatacgtagattatttgaaaattatgggtagcaatcatatttttacaaggttgttgggtgagctaaagatcaaatgtgtaaagaactgtggcaggctgggcacggtggctcacacgtgtaatcccagcactttaggaggccaaggcgggtggatcacctgaggtcaggagttcgagaccagcctggccaacatggtgaaatcccgtctctactaaaaatacaaaaatcagccaggtgtggtgccacacgcctgtaatcccagctacccgggaggctgaggcaggagaatcgcttgaactcaggaggcagaggttgcagtgagctgagatcacgccactgcactccagcctgggtgacagagcgagacaccatctcaaaaaaacaaacaaacaaacaaacaaacaaaaaacaggggcagacactgtcaacaccaaaagtcatcctcttgtcttaattcttcttgctaacagaaccccagttctttcaagggtccctatctcagaagttgggctcagtccctagagggggtgggcatgcaaaccaggtctagttaatgagctatttgagggagggggccctctgggggtagaaggttaataaaaagtttggttattttatttttatgcttttatttttttagagacaggaccttgctctgttgcccaggctagagtacagtgccacaatcatagctcactgcagcctcgaactcctgggctaaaggaaggtggggactagaagatggataagcactccacacttgttagctatctattattgctgttagcactgtcattatcagtatttttttttttttttttgacggagtctcgctctgtcacccaggctggagtacagtggtgcactctcggctcactgcaacctccgcctcccaggttcaagcaattctcctgcctcagcctcccaagtagctgggagtacaggcgcctgccaccacgcccggctaatttttgtatttttagtagagacagggtttcaccatattggccaggctggtctcaaactcctgaccttgtgatccgcccgcctcggcctcccaaagtgctgggattacaggcatgagccaccacgcccagccctttttgctttttttttttttgaaacagggtcttgctctgtcacccaggctggagtgcagtggtgcaatcttggctcactgcaacctccacctcccaggttcaagcaattctcctgcctcagcctcttgagtagctgggagtacaggcatgtgccaccacgcccagctaatttttgcatttttagtagagatggggtttctccatgttggccaggctggtctcgaactcctgacctcaggtgatcttcccgcctcggcctcccaaagtgctggaattacaggtgtaagccaccacgcacggccctttatcagtattattattattaacttttactaaggaaagagggaggcccttggccaggccgtaggattgctggccttccagggagtgtgttacccagggaagtggcataaaattacagaattgggaagctaagaggtagctctagacatcacacctctaaactttttgatattctgttgctccatctacaaatggcatttagaatttttgttcttaaagagtcacaaatcacgtgcaggaagcttgaaaccagtcctgttaccttcctatgctctgatgccacctgggaatttgagctggtgtttcgggtaagagaacagcttataaccaggcttttcaggacaatgaagactgcctttcagtgggaagatgaacaatctgcctaagtcataagaatgatacaatggactttggggacttgggggaaagagtggaagggggtcgagggacaaaaggctacaaatatggggcagcgtatagtgttcagatgatgggtgcaccaatatctcacaaatcaccactaaagaacttactcatgtaaccaaataccacttgtaccccaataacttatgggaaaaaaatctacccaaggaataaaactaaattgagactttaaaagcgagacattaaggaagttgactcttagctgacctggacacaggcctatcatggtaagtgctgcaggtgaacaaacagcagcaatttgacccttcttccttatacatcaaattcctttttttaaaaaattatttttgagacagagtctcgctctgttgcccaggctggagtgcagtggcacgatctcggctcactgcaacctctgcctcccaggttcaagccattctcctgcctcagcctcccgagcagctgggattataggcacccaccagcacgtccggctaatttttgtatttttagtagagatggggtttcgccatgttggccaggctggtcttgaactcctgacttcaggtgatccacccactttggcctcccaaagtgctgggattagagacatgagccaccgcgcctggcccaatttcattttttttttttttagacagagacagtgtcttgctctgtcacccaggctgcaatcagtggcgtgatcatagctcactgcagcctcaaactcctgggctcaagagatcctcctgcctcagcctcctgagtagctgggactacaggtacatgccaccacgtccgactattatttttattttttgtaaagatggggtctcattatgttgcccaggctggcctcaaattcctgggctcaagccatcctcccacctcagcctcccaaagtgctgggattacagatgtgagccaccacacccagcccaaattccaattttctaaagaatctggggctctctgtgttttaagactattaggctctccccagtttcaggggatgaatcttgagcagtctgatggagggctggcaagccattgcctaaacccggcccaccacctgcttttgtacggctcaggagctggaaatggcttttacatttttaagtagttagaaaagatcaaaagtgtaataatatctcctaacacataaaaattagatgaaattcaaatctcagtctccataaataaacccattcacttatttattatcatctatagctgctttcacactgcaacagcagaacagagtggttgctacagaaactgtgtggccacaagcctgaaatatttattctctggctcttcagaggaaaagatcttaggaagccagaggttctcaaactcagtgtccatcagaaacccccggagggcacgtttaaacatagactatgggccgggcgcagtggctcacgcctgtaattctaacactttgggaggccgagagtttgagaccagagcattgtttaagccaagagtttgagaccagactggacaacatagcaagaccctgtctctacaaaaaataaaaaaaatagctgggtgtgggggtgcacacctgtagtcctggctacatgggaggctgaggcaggaggatcgctcaagcccaggagttggaggctgcaatgcgctatgatagtgtcactgtactcctgcctgggcaacagagaccccgattctagtaaataaataaataaaaacatagatcccaccccagagtttctgatttagtaggtctgaactggggtctgagaatttgcagttcttaaaattgcctagacatggcagatgctgctggcctggggatctcactttaagaagcactggtctaaggcaaccttgggaattccattcccttgccagcaactggcttagaaaagggcacgtgatacatttctgaccaatgagatgaaggagaagtcagctggcagcttctgagaaaatgagaaaatgatcataaaaagggacagatgggctgggcgtggtggctcacatctgtaaccctagtgctttgggaggttgaggcaagaggatcacttgaggcccagagttcgagaccagcctgggcaacagagggagacctcatctctagaaaaaactctaaagttagctgggtatggtagcatgcacctatagtcccagctactcaggaaactgaaggaggatcacttgagcctagaagttcaaggctgcagcgagctatgattgcaccactacactccagtctgggtgacagagcgagaccctgtctcaaaaacaagcggggaacaagtggaagaaggctctcttctctcttgtccatattatcttgagaccatgatggggtgtggctgagggcaagagccagctgctaagaatggaatagtggaaaagtggaaggaaacaaggcccaccattccacaatggagccactgaatcaattaaccacatggccccctgcagagaaacaataacttccattagcatctacaccacttccagttgggttctcagtgatttgaagccaaacacaacctacctggcaaccctacaacttcacccctcaccactgtttggacactaccaaacttaggccatgatgattaaggccaggcatgagctccaccctccctgccaccctatgaggaataaagcagatatggggaaggtgaaagggcatgatttagggatccataaagccccagattggagccttagttctacaactcaataatggtgggctagagctctatgcaccccatactctaggatggggactcatacctgcatggttgactagtgcagtcatgtctgtgcatctgagcagttattttcttctctggaccattattaaccattagagctagcatttgtccccaggtcccgggcactgtgcaagtcttcacctacattatcctactacctcataagatagtttggatgtgtgtcccctccaaacctcatgttgaaatgtgatccccaatgttggaggcggggcttggcgagaggtatttgggtggtgggagcagatccctcatgaatagcttggtgccctccctgagtaatgagtgagttctcactcttttagttcacggcgaggtctgattgttaaaaaagtgtttggcacccttcctgtctctctctcacccctcttctcaccatgtgacacacctgctcccctttcaccctccacagtgaagaaaagcttcctgaggtctcaccagaagcagatgctggcatcatgcttcttgtacagtctgcagaaccgtgagctaaacaaacctcttttcttataaattacccaccctcaagtattcctttatggcaacgcaaaacaggctaagacacctcaatggactaatacataacagccccataaggtgagtgccaccatctcccccaccttacagatcaggaaacaggggctctgaaaaactgtggctcactcaaggtcataccgcttgttaagtgcagagataggattccaactcagaggcatctggctcaagaacccacgtgtctgtgtttcaggttgcaatgctgaggttaaacaagaggatgtgtgctaggagccccagcacaccacaggggctgggaaacgttattgcatcgagtttgagtccaacacacggtctcattcctccacccaccactcagcctagaaaaagggtcggaaggttgactccactttcagaagcttgccagctccagccagtcagccagagtgaagctgacaagagcaatgagggaaatacggaaagataaatccagatgtggacaatgagaccgtgtcccctgagaactgtggtggcagagggactcaaaggtccaggcctgctcggcgtggctgcggcttgggttcctgggccacagggctgccttacctgccagtttccatgcctggctgactcccctcactgcccctctggcttccacaccagcccactgatgccaccccagagaactcggctgtttgccttgctcctctagagggcaggtggatgcggtgaaacgggcagcgattccagggccatcacaactcctggctgaaaccaaacatgacagatttaccattgggcaggctgctccatttattatttaacgctcgcaataaatatttgcatgacccagtgctggagggaacgctctgtgataactcactgcattttcctgccaaacaccagcacagtcggattccgaagctgcagcagagaatattttatgctattctaaaaatccaggtgatggccccttgttagaaaaccttttctcatccatttccatagaggaaaaaaggagcagggagaccttagctctgagaagcaactagaggaggaggaagaggaggaggaagatgctgacaggtgacatttacttagcacctactgagtgccaggccctaagctaaggacttcacactcattcattcaacacctctctctagagggtagggttgccagacttaacaagtaaaaatatacgacacccaattccattttaaatccagtgaaataaggaatgattttttaaatacaagttatgtatctgatgtaatactggaaaattattcaatgtttatctaagcttcaaatttgggtgcagtggcacgcacttatattcccagctacttggaaggctgaggcagggaaatcacttgaacccgggaggcagaagttgcagtgagccaagatcatgccactgcactccagcctgggcgacagagcgagactctgtctcaaaaaaaaaaaaaaaaaaaaaatagaacaaactgggctacaaagttttgccaggcatggtggctcacgcctgtcaccccaggactttgggaggccaaggtgggcagatcacctgagatcaggagttcgagaccaacctggccaacagggcaaaaacccatctctactaaaaatacaaacattagccaggcctggtggtgcacgtctgtaattccagctactcgggaggctgaggcatcagcatcacttgaacctgggaggcagaggttgcagtgagccaagatcatgccactgcactccagcctgggggatagagtgagactctgtctcaaaaaaaaaaaaaaaaaaaaaatgtaactgggcatcctgtttgtatctggtaacactccttaaggttggactaactatgcgaagacactgaatttaaaaggcttttcttttcatttattttttaagagacgtatctgtgtaactcaggctgcagtgcaatggctattcacagggatgatcagggctcactgcagcctcaaactcccaggcttaagagatggtcccacctcagcctcccaagcagccgggactacaagtacatgacactgcgtctggtgttcagtggtgcaatcacggctcactgcagcctcgaactcctgggctcaagcaatcctcttgcctcagccaccagagtagctagaactatgggtatacagcaccacgcctcgctatttttttttttttttttttttttttgtagagatggggtctcaatgtgttgcccaggctgatctcaaactcccggtctcaagtgatcctcctacctcagtctcccaaagcactggaattacaggcatgagccaccacgtccagcctctttttttctttaaggaggcttattttttagtgtgggttagggaagagccatgtgtgaagttgactctggagcagagatgtcaaagatgagaaagagctacccataacaaaaaaatggggaacaggattcctggcaaagaccccacaaagaccctggggctggaaaccatgcggggcattggaggagtcaagggaggtgacacttttggagctgagtaatggagaggagagtgacaggagcagactgcacagggccttggtcacaatgaaggatttggatgctattctaagttaaagggaaggcatgggaaagcttttcagctggaagtggccaaactggggaccgactctggctgtacggatttctgagcctggagatggcacaaaggacctgacattggcaggaaaagaaaagaggaggaacaagaacacaagaaattgccttaaaagggagctggtcaggtctcaccagaaaaattcacgcaataacaaaccagccgcccacaacagacatctccacattttcccagagctgtcccccagccaggcggccggagtgaggggatgccgacggtgacaatgctatcaatttccattttgcttttgccaaatacggaaaaggacacttcaaagacttttaaaaataacttccaaacaactcaagggtgaaaaaaaagaaagaggtaaaaaattacagtctgcctgcttgagaatagcgataatgaaaataagtgatagaaataagaacagctgcttttgcacacgttatgtcatctgctccttagcactctatgaagcaggcagaacaggtcatggtatccccatttcatagataaggaaactgagacccagaaacataggatacaacagagaggaaatgatcaggtgggtgagaagctatgtttgtctggccccaaagcctgggttccccaaagccctctgcaggctgatatgagcctaaccccagcccggctcctggctctcagccatctcatcctcccagcccagctatggggagcaagatacctcctaccatgtcccttgcagccttcctccctcgcctgcaggggcttcctgcctggaaagcctgttcctttgcccttcttctccagaggattcacgtacctcagcacatgttcgacgacaaagtcacagcactgcagggacacctcccctggagaggaacacgatggtagagtggaaggggcacagctttgccattagaatgcctgagttcaaatcccagctcaatcaccaactggttgggtatccttaagctcttccaaggagtgggggataatccaatccatccccacaggatcctggtggggattaaatgagatgctgtatgtaaaacatcaacacagggccaggtgccatggctcacacctgtaacaccagcacattgggaggtggaggcaggagaatcgcttgaagccaggagtttgagactaacctgggcaacatagccagacccctatctatacaataaaatgtctttttaattagctgggtgtgatagcccatgcctgtaatcccagctacttgggaagctgagacaggaagattgcttaagcccaggagttcaaagctgtagtgagctatgatcatgccactgaactccagccatggtgacagaactagaccccaactctaaaaaaataaaaaacattaaaaaaaaatcagcacagtgcctggcatacagtcagcacctaataagtagtagctgttttttgttttttgtttttttttccatctctgaaaaaaaaatcagccattttttaaaattagctgagtgtaatggtatatctctgtaatcccagctacttgggaagctgaagcagggggactgcttgaccccaggagtttgaagcttcagcgagctatgattgtgccactgaactccagccatggtgacagaacaagacccaatccctgaaaataaataaatcaattggcacagtgcctggcatatagtcagcacctaataagtagtagctgttagaataattacaaaaggccaggcgtggtggctcacacctgtaatcccaacactttcagaggccaaggagggtggatggcctgaggtcaggagtttaagaccagcatggccaacacagtgaaaccccatctctgctaaaaatacacacacacgcaaaacaaattactgggcatggtggcacatgcctgtagttagtctcagcttcttgagaggctgaggcaagaaaatcacttgaacccaggatgcagagattgcagtgagccaagatagtaccactgcactccagcctgggtgatagagcaagactttgtctcaaaacaaacaaacaaacaaaaacaaaaaaaacactcaaatcatgggattgagtgttcaatcattcaatcaatttttattgaatgcctactacatgctaggtacttagggatataacaggaaataagacatacgtgattctaccttaatgaaacttagaagaaggaatatacttatggtatagtgaaagaaacatatttattagaaatcaaacataaaaagcataaaaagtgttgaagagtgctctaaaagaacagaggtttctgtgaatcatctactttatttatttatttatttatttatttatttatttatttattttgagacagagttttgctctgtcacccaggctggagtgcagtggcgtgatctcagctcactgcaacctccgcctcccaggttcaagcgattctcctgcctcagcctcccaagtagctgggattacaggcacccgccaacatgcctggcttatttttgtatttttagtagacacggggttttactatgttggccaggctggacttgaactcctgatgtcaggtgatctgcctgcctcagcctcccaaagtgctgggattacaggcgtgagccactgcacccagcccggaatcatctactttagactgaggcatctgagacgcgctcaaaggacatttcagtggagaaccatgggtgtgaaggagggagtcacacggagactgggaagggacggacctttgtaggacagacggcaacacgtgcaaagcttgtgctgggaggtgaagggagaacaactcgctggaggaagcaaggaagaggagatttagttagagcagacagccaggatcagagcatgcagggtctgatcatttatttccaagttattctgaaatcaaagagaagcaggcttttaagctaagaatgcagcacatcggctggcatagaataagagttcaaaaaaagtgtaagctcccttccctatcctgaaacaaccaaagtaaataaaaatggcccctctgttttgaattatttatttatttgtgctttcaaactgttttcttaaaaaaaaaaaaaactacagagtagtgagtgggggcgggggggtaaggggtggaatactcaaaacgtgttcaaaatcaaacgagccagaaactcctcgctggaaattttctctctagatctctgcaggaatcagtggaaccatgagagacagagtcgaaagcagcagagcctggaattatttctctaagcaagacccagacgccacgcaggtagtgaaattgctcctgccccacctccatccttgctgcctatctgagaacagagtctgccaacccctcctgatgagagactgacccctcatagccactgcaggctggaagccataagcttaaaccacttccataccatgaaagcaaaatgtatggttggcaaaaagcaaaaaaaaaaaaaaaaaacaaaaaactggttactggcgagtgcagaatcacagtctgggtcgatgacaaattatccagcatgaatcttggtgtgacttaggcccttcttagtcctctaaaattcatcacattttgtttattcgttcactacccacttacagtagatgccaagaaatatatataacaagattatagatataaatttaaaattaggactaaagaaagataatctagaataagaggtaaaagcagaacagagcaggatggaaggtagaataaagatatacaggccagaaggccagttactaaactggatttgagaacatggcgctgagttccctggtggccaagtcaaaaagggcagttggagatgttctcatggtccacaaaaagaaacacacttaactttgcagaacaagcactgtcctgccgtgtgacctcagataagtgatttaacctacttagactcagctgcctcattgccaaaaagttagtgaaaactattgaatgtttaggtaaaaagttgtaataaaaaacaagaatgggaaaggattccctatttaaaatggtgttgggaaaactggctagccatatgcagaaaactgaaactgggccccttccttacacctgatacaaaaattaactcaagattgattaaagtcttaaatgttagacctaaaaccataaaaacccaagaagaaaacctaggcaataccattcaggacataggcatgggcaaaggcttcatgactgaaacaccaaaagcaatggcaacaaaagccaaaattgacaaatgggatctaattaaactaaagagcttctgcacagcaaaacaaactatcatcagagtgaacaggcaacttacagaatgggagaaaagttttgcaatctatccatcgggctaatatccagaatccacaaggaacttaaacatatttacaagaaaaaaacaaccccatccaaaagtggccggaggatatgaacagacacttctcaaaagaagacatttatgtggccaacaaacatgtgaagaaaagctcatcatcactggtcattagagaaatgcaaatcattgtcagagtgctcagagagggcatgttccctgggtcttggtggatttagaggtcaagggaccatttctggaagctcactgtgtgccagggcagcttatatcagagctccgctctttttctttctttttttttttttaagacagagtctcactgttgcccaggctggagtgcagtggcaccatttcggctcactgcaacctccacctcccgggtccaagagattctcctgcctcagcctcctgagtagctgggactacaggcatgcaccaccaccacacccggctaatttttgtatttttagtagagacggggtttcaccatgttagcaaggctggtctcgaactcctgacctcaggtgatccacctgccttggcctctgaaagtgctgagattacaggcatgagccactgcgcttggccagagatctgctctggaagaccccccaggccggagggcactgccacaagcagacagtatggcgagggtccctatggccacctggcaggcgaggtggattctggagggaggtggcctgggagcaggctgaggatggggtgagggcatttgagcagcagagtgtctgcgtgaccgggcataactggagggacagtaaatgactcttgtgtgagaggatgagggaggggtgagaggggctgactacccccaggacttggggtgcagtgagactccttagctttatccagactcatgggagccatggaggtttgaggcagaggcgtgggctgctgggagagtgaggactcaccatccagagaggaaggtgaagctttcaactctaaatgccgttttattttcgtgtgttttttttttttttttttttgagacagagtttcactcttattgcccaggctggagtgtgatagcacgagctcggctcactgcaacctctgcctcccgggttcaagcgattctcctgcctcaccctcccaagtagctgggattacaggcatgcgccaccatgcgtggctaattttatatttttagtagaaacagggtttctccgtgttggtcaggctggtctggaactcctgacttcaggtgatccgcccgccttggcctcccaaagtgctgggattacaggcatgagccactgtgcccggccccaaatgtgttttacattttcttcctatttgattcatctttgtcgtgcaacataaatatgctacttttccactgataaaaagacaaaatgaaatttaaaattggcctggacttctcaaaaaagtcagtgtgatgaaaacatgttctagataaaacagaaatgagactgcgcatggtggctcatgcctggaatcccagtgccttgggaggccaaggaaggagaatcacttgaggccaggagtttgtgaccagcctgggcaacatagtgagaccgcagatctactaaaaatttaaaaattagctgggcatggtggtgcgtgcccgtatgtctggaggctgaggcaggaggatcacttgagcccaggatttggaggctgcagtgagctatgattgtgccactgcactccagtgtgggtgacagagtgagaccctgtctctatttaaaaaaagagagacaagatgatcaggatgagcgcagtggctcacgcctataatcccagcactttgggaggccaaagcaggtggatcacatgaggtcaggagtttgagaccggcccagcctagatggtgaaaccccgtttctactagaaatacaaaaatcagctgggtgtggtggggcacgcctgtgatcccagctactcgggagactgaggctggacaattgcttgaacctgggaggcagaagttgctgtgagcaagatgacaccactgtgctccagcctgggcaacaggaatgagacactgtctcaaaaaaaaaaaaaaaaaaaaaagggatgatcaaacacaatgcatcaacctcccggagccgtataaaccctaaacctaaaccaggaagcaggcaagcctgtgtgtgagtttccactctattgctggtaccactcggctctggcaacccggaaggccaccttcccctgttgttactgtgtaaggaggaaggagcactggtttgcaagtcagaagcctgggttgaagcctctgcttgagttcctgctggctgtgggaatgtggggttacctttcccggctggcctcgtttcctacatgtccaatgcaggggttccagtcacatgcattgggcaccattacatgtccaagctgtgccaggatctagaaaaatggctgggctcaggccaaggggccttcctgtctggcagtgaaaataagaggagataccaagggccctgagcctgagtctggaggaaaagtcatgagcacagggcagtgccagggcctgggagctgccacagaggagcccaccttggtgacagacacctgtaggctcatatgatgccgagtgcccaacacagggaactggacaaaggtttcatgcacgactcttttccctccttggctaccttgaggaccttgattataatagttagccttttttttttttctttttttgagactcttgctctgtcgcccaggttggaatgcagtggcaaaatcttggctcactgcaatcttcgcctctcaggttcaagtgactctccttcctcagcctccctagtagctgggattacaggcgtgcaccactatgctcggctaatttttgtatttttactacagatggggtttcaccatgttggccaggctgatcttgaactgctgacctcaggtgatctgcccgcctgggcctcccaaaatcttgggattacaggtgtaagccactgagcccagccggattataatagccttttcatgcaccaggggctttatactcattatctcatttcattcatatgagttgaagtcagcttatcccccatttcacagatgaggaaaccaaggcccagagaggttaggaatttgtccaaggtcacacagccaggaagtaggattcaaacccagacagccaggctgtaatacctaggctcttctcaggctcatgcccttcccaggggtctgggaagccctgacctgcagcctgtcacctttgtttaccccccagcctccaggatattacgtgtgcaccggcgtgggatcctggaactggcaggaattgtgggttgtgttggtccctgaactcccatcgcctatgtgaaatatggttgcttttgtggcttgggaggccatggccagccccgcgatgccattgactggtgagtgcatgcctgggaccaggccacaaaatccctcacactctggggtagtcaaggcttatgaggaagtacccaaaactgaagctggggtttggtccagggagatcccagtgtgcagtactactttgcaggcaggcagaggcctcttggataacatggccagtgaagccagatcttggtactagctgtgccttaccctggccatgggctgaaaacgttgccttaaaaaattggccaggagcgctggctcactcctgtaatcccagcactttgggaggccgaggcgggcagatcacttgaggtcaggagttcaagaccagcctggccaatatggtgaaaccccatctctactaaaaatgcaaaaattagctgtgtgtggtggcaggcatctgtaatctcagctactcgggagactgaggcaggagaattgcttgaacccgggaggcagagtttgcagtgagttgagattgcaccgctgtattccaacctggacaacagtgccaaaccctgtctcaaaagaaaaaaaaaaataatataaagtgaccaggtgtgttgactcatgcctgtaatcccaccactttgggtcgaggcaggaggatcactggagcccaggagtttgaaacgagcctaggcaacagagtgagaccctgtctctatattaaacacacacacacacgcacacacacacacacacacacatacaaaggcagccagactatgcactaggaactgccctgggaatccctttgtgttctcacaacaatcccatttcacatgaagaaacctaggcacagaaatattcagtaacgtgtccaggtgcggtggctcacgcctgtaatcccagtactttgggaggctgaggcaggcagatcacgaggtcaggagttcgagaccatcctggccaacatggtgaaaccccgtctctactaaaaatacaaaaattagctgtgtgtggtggcaggtgcctgtaattccagctactcaggaagctgaggcaggagaattgcttgaacccgggaggcagaggttgcaatgagccgagatcacaccactgcactccaacctgggtgacagagcaaaactccgtctgaaaaaaaaaaaaaagaaatattaagtaacttgtctgaggccacatagttaccaagacgtgggagctgggacttgaacccaggcagtctggctggattcatgcctgcagcctctgcactcctgctacttactgtgtgagaagcgtctgttctgtggaaggttgtgggctgagatctttccatgacttccactcatttacccccaaggctgttcttaaagacgggcatgacagttatgcccattttacagatggggccctgaggctcacaagggcacgccactcacccatttccacaaagctatagttagttagcagagggcagaattcggccgcctctcccctagcttgtaggctgtgattgacacagaggtttttttgttgtcgttgctgttgtttgttcctttttcttttttttgagacagggtcttgctctgtcatcccggctggagcgcagtggtgcgatgtcagctcactgcaaattctgcctccaagatgcaaatgattctcgtgcctcagcctcccaagtagctagaattacaggtgtgcactaccacgcccagctgttttttgtagagatggggttagtagagatttgtttaatagagacgggtttcaccatggtctctactaaaccctgtctctactaaaaatacaaaaattacccaggcgtggtggcacatgcctgtagtcccaggtactcaagaggctgaggcaggggaatcacttgaacctgggaggtggaggttgcagtgacccaaaatcatgcactctagcctggggtctcgcttttgcccaggttagagtgcagtggcacaatcatagtggctcactgcagcctcaaactcctgggctgaagggaatcctcccacctcagcctcccaagtagctaggactataggcatgtgccatcatggcgagttaattttttgtgtgtttttattgtctcgagacagagtcttgctctgttgctcaggctggactgcaatggcgtgatcctggctcaccgcaacctccacctcctgggttcaagcaattctcctacctcagcctcccgagtagctgggattacaggtgcgtgccaccatgcctggctaatcttgtatttttagtagagacagggtttcgccatgttggtcaggctgctctcgaactcctgacctcgtgatccacctgcctcggcctctcaaagtgttgggattacaggcatgagccactgagcctggcctggtgagctaatttttaaatttgttatagagacaagagtctctcttatgttgcccaggctggtctcgaccccctggcctcaagtgatcctcccacctcagcctcccaaagtgctgggattacagatgggtgtcaccgcacctggcctctgaggaggatttcattataaacctgccctgaagggagggaatccaattttacgagagggtgtagcctggtgaggcctggatgacctccggaggcaggggcttgtgcctgggctgaggcctaagggacaatgggcagacatgaagttgccccaggcagagggtacagtgtgggcaaagtcaggaagtggcagggcttggatcactccaggaagagagaggagtcatgtgtcacaggagctcaagacccagagagggaggcaggcaggcaggcagggaccaagcttgggcacagccaggaaggcagagggcatggtggggccaatggaatcattacccaagacggggattttcagggaaacagcttagataaggccaggcgtacagtagctcccacctgtaatcccagcatttgtggaggctgaggtaggaggactgcttgagcctgggagttcgagaccagcctaggcaacatagtgagaccccatatccataaaaaatttaaaaaaggagtctgtgttcctgtagtagcagacttgggaggttgaggtggcagtatcacttgagcccgggagttcaaggctaaagtgagctgattgagccactgcactccagcctgagcaacagagagatacgctgtctcaaaggaaatacaaattaaaaaaccagccaggcatgctggcgtgtgcctgtagtctcagctacttgggacactgaagtgggaggatcgcttgagcccaggagttcaaggctgccgtgagctatgattgtgcctctgcagtccagcctgggcgacagagaaagaccctgtctcttaaaaaaaaaaaaaaaaaaatcttagataagaggatgctgtgcctccctgggggtcttcagtcacccatagtcctggcaagagaggagggccaggagagagcttcacccacctgctgtcctgcccatgtgacatccgcaggtgctgccatggccacgactgttgttacactcgagctgaggaggccggctgcagccccaagacagagcgctactcctggcagtgcgtcaatcagagcgtcctgtgcggtgagtccccagcagcaccatgccacccaccccgagtatcccctgggcaccctggcatagccagatgacttccgtgcccctgttgcaataaccactgcttccaagtctctatagaccaccccttgggtatatctaatgtaagtgatatttattttatttattttttgagtcagtctcgctctgtcacccaggctagagtgtgctgatgtgatctcggctcactacaacctctgcctcctgggttcaagcgattctcatgcctcagcctcccaagtggctgggactacaggcatgcaccatcacgcccagctaatttttgtattttttcagtagaggtggggtttcaccaagttggccgggctggtctcaaactccccacctcaagtgctctgcccgcctcggcctcccaaagtgctgggattacaggcatgagccgtggtgtctggccctaatgtgagtgatctttaacactgagcacttgaaaaagaaaaccctgaagaaacctaattctttgatgtctggatgacaaggaagaagatagaaatggcatcagataataaacagtgtaaatgtttatcagaaagaggctggtggtcgggacaagtaggaggattgcttgagtccaggagtgcatctctacaaaaaagttaaaggattttttaacattggccaggcgtggtggcacacatctgtgatcccagctacttgggaggctggggcaggaggattgcttgaagcccaggaggttgaggctgcagtgagctgtgatcgagccactgcactccagcctgggtgacagagcaaactccagtctcaaaaaaaaaacaaataataatattttacataaccaaccacttctaaagattaaaaaaacccctatgattaaaaacctcaggtccctcaggcaatcataccagatattgaaacaaagcaataacataaggactgcagtattcattttatttttatattatttatttattcttccttagtttcttgagattatcatccgctgagggtggaaggggagtgagcagacacacttgggaggtgtcttgagattatcatccgctgagggtggagctgagggtggaaggggagtgagcagacactcgggaggtgtcttgagattatcatccgctgagggtggaaggggatagagcagacactccgcaggtgtcttgagattatcatccgctgagggtagagctgagggtggaaggggagtgagcagacactcgggaggtgtcttgaggctcagggagttatcaattatagaatgttgttgagttggaggaggtggctggtggcccatcctgttttttaaagtttcagctgtgaggtagggccagtagggcaatcctgaagaatgacgatgctccgctgccgccattctgacctgtagggccaaaggagggaatgttttcacacatattcatttgatggacaaaattaccgccaccaacacagtctgcaccttctgttgctggtgatagatttttgcacctttccatcctccaggtttcaaaatagcagtgtcagtgtcataatatcacccttccactgagtactgccgacagctggggggtaaagaaaagtcattgggacacactgttgtctccacatgccactgtgtctgtctgcaaatgtaggcaggctggggtcctgccccagggaagacagagtcataacagagtaataaagaagcatgtttgagacacaggagtgtctatgtctatcctcattcctccctcacagccatcaccagagcatgtttcttgcaccaggtcaatagacagtaagagacagtaagagaggcatgaaaagcccattgtccacacatgttgcagcttctttttggagaatgttttccaggccttttatgttctgtctctgattctcagaactctgcaaggtcagtgtgaccaccctgctccaaatctaagaaaacagaggtttccagaggaaggagaaattgtgcccagggtcacacagcttgcaagaggcagagtggaagttgattccagctctgcctgcaggaccctctcatttcccctctgtttcccttcttgacaaaggatcttcttcactctggaggtgccacccatgagaacaaagagctctggagagatgtggattcctgaagagctgcaggggaactgggagagggttttctgacagaacaatcttacctcaagaagtcagttaggcatggctgtaatatttcttttcactcccaggtaataccaaattgtaagtgcactaggacctaaagaatacttttgtccatggaaaaatgaggtgggaattctaaacaaagcaagttttaaaactgtgtttcacttcaagtgtacaagtcccatcgcgtgtaatcataggactcggcagcttttgaaggtacagaggccacacaagaaccagcttagctgagcatcatttaaggccttcatttggaattgtccctgtgggtaataagttacattcactcttcactaatttacagtcagggcccatttgctattacaaatacggaacctctgacacttagaatattagatgggggccccactgggtggggatgaaggtgtttttgcgcaacacggttaccaacagggatgggactgtgatgcttgtaggcagccttcctctctgccatctccctctgcagggcttgagcacagagccgtagggagaaaaatgtatccatgtcctgacctggcagactatgtccaaaagcaaggaaaacaagcaaacttacccggttgcaaagaggctttcttgcagaaggggtgatctgaaaaagccaacacatgagaaattgaatgttgagagagtctaagggccgtggcatcatctgcatcagcactgaactatcctgcaactgcggggaggaagctccttactttgcatctgtagtagtcctctgcccgccgccgcaacgcttgcgcacgttgaaacatttccctatggattacaatcactttcatcagataaagcaccactttcaggatgattttaaataatctgccatgtttctgttatcctcacaactgtacccttacacaatctatctctacctagaaaacgtatttcagatggctgtaagagtacagtctgagccggtcacggtggctgacgcctgtaatcccagcactctgggagggcgaggcggatggatcacgaggtcaggagattgagaccatcctggctaatacggtgaaaccccgtctctactaaaaatacaaaaaattaggcgggggtggtggcaggcacctgtaatcccagctactcaggaggctgaggcaggggaatcacttgaacctgggaggcagaggttgcaatgagccaagatcacgtcattgcactccagcctgggtgacacagcgagactccatctcagaaaaacaaaaacaaaaacaaaaacaaaaaaaactgtacagtctgatccaaactgttgctgtattgattcctcctcttgcttactgcctgctgacttctgagatgatagcttccttccccattctcagtatatccctaattcatccttcattgagcatcttttatcataaagctgtattctctttgtattaatatctttaccgtgtttcacagggcagaaacagctgggcttataaacaggcatagtccttttgaaggatgtggttgatcctacaacaacacactttcctaaggatgacaacaactcaccccacccctagaatggctggtatgaaccgagtttccacacagtctagctggcaatggggtcaggagccgttttgctacttcacatcttttggtcactggtaaatattaaggtactttgttttctgttttgtgaactctctctctctctcacgatatgtcttctgaccatttgtttctatttctgcatttactgggtctaaacattgtacaaaggttaaaaacaacactccaatgggcgtttcccaagagggtggggttcagtttctgaactcacatgtaggtgtgtatttctttcatatccaatttcccgttttcctctgcctctgacacctgcctctccttttctccgtgctcacgttctttcatgcttagtttcctcagactagaagggagagaaatgcacacacatgatccaccagcccgtgtgggattccctctgcccttctggcatctgaaggctgattcaaagatcccccctgcaaccttcccacaaatgaaccaactgattctcacaagcaaagggagaatggacacctcccattgagggacaaaaaaaaaatcacactctggcctgctggcaagtcacctgtcatttccagctcatcttcatagttccatagttagtcctattctttagtaaatataaagactattaaaagcttctatgaggtgcactatgtgtgtctctggggtcagtcttgtgcttgacacagcgaaagctcattttagttcagtgtgaaaaaccagacctcaccaattcatcacaactaactccatcggaggcagaggattgctcctcatctgactcctcctgtgtgagacctgattctcagtcagaggctgatgccggaactgagaccatcagccatagagagatccttccagaatatggtgtcattaaccccgcagttcactactgcactttgccatgattcaggactggaactcttgtcatcgactttaaagatcctgaaaaggcaatctgaatgctgggcgcatctattgaattagaaatgatcggaatggctcctaagtcagggtgttatgtcctgaaaataggtgacaactgcaaaccatccaccctggtgttgactgactttaacaaggttcagttcacagagattgagggcagaaaaaggaaacggcctcaaaagggtaagtttgctgtgttgccctcacaccacttgattcatggtcctgatcctaaggatctcacctgatacttggttttataggaaggatgtgtaaaattcccagaatgctaggaaacagggatgaaaacacttcaaagagaaagttaatgaacttgtttctgaccacagggcatccttcagcacatgctgtctggagtggcctcaaacaaggtgtgtgtggtgaggtgctgacaatgcaatgggagcagggtcctgtccccacgctaaagaagctcacagtttaatgcaaatgagaagccagtgaggacagcactactcctgctgtgcacttgggaactagaaacacaaaacctgactctggagggaagctaaggaagcattctactcttgagttgacataagtgcatctgaagcttctgatctccgatgagaacaatgggggacaccaaacagaatataaaacccatgactgaatacatcaaattgctcacatggcagtaaacagacatgaggtgaagatggagaagaaggaaacccaggacgaaagtcagcctcgcatttggaacccatttccctgagtttcattgctgaattccagaaggaactactgagatgcaaagaagcacagcagcttttgcacacatgtgtggggttagatggaaaacaagtggattgagggtctgccaatgaaagcgacccatactgaagtccactggctctggttgagacccagaagagtcatgcatcagaatagaggtggacaggaaataccctggcctttgtagggactgagcctgcactgacgacctcaattgcagcctgtatggaggacccctgaccatcccccagaagtagactcccatctcttctgcagcaagataacatgctactaggcctcaattcattgctaaatattttttaacaagtatctcacatttaacaaaaaaagatcagtcatatggcagcaaaatacaatgtaatatgaccaaaacatgaaagactgtgaaaatgaatctggaggtgacccgagcattgaattcaacaatccaggctgggtgcggtggctcacaccgggaggctgaggtaggcagatcacctgaggtcaggagttcaagactagcctggccaacatggtgaacccgtctctactaaaaatacaaaaattgggctgggcacggtggctcacgcctgtaatcccagcacattgggaggccgaggtgtgcggatcatgatgtcaggagttctagaccagcttggccaatatggtgaaaccccgcctctactaaaaacacaaaaattatccgggcatggtggcatatgcctgtagtcccagctactcaagaggctgagggataagaatcgtttgaacctgggaggcggaagttgcagtgagccaagatcttgccactgcactctagcctgggtgacagagtgagactctgtctcaaaaaaaaaaaaaaaaaaaaaaaaaaaattggccaaatgtggtggcacactcctgtaatccaagctactcgggaagctgaggcagaattgcttcaaactgggaggcagaggttgcagtgagccaagattgcaccacagcactccagcctgggcgacagagcgagactctatctcaaaatttaaaaaaaaaaaaaaaaggctgggtgtggtggctcacgcctctaatcccagcactttgggaggctgaggcgggtggattacctgaggtcagaagttcgagaccagcctggacaacatggtgaaaccccatctctagtaaaaatacaaaaattagctgggcgtggtggtgggcacctgtaatcccagctacttgggaggctgaggcaggagaattgcttgaacccaaaaggcagtgagctgagattgtgccattgcactacagcctgggcaacaagagcaaagccccatctcaggaaaaaaaaaaaaaaaaaaaagagagagaaaggaaaaccaatgccagtactagcaactcctcttcccctgaaaaaatgacaaacaagaatgtaggaagggaaaggaattatacagcttaaactaatgaagcagaaaggacaaactcaattttgaacccactgaatttgccacaaatattgtagaaaatattctcaaggactttacagttgtctactttgattggcacatggttcatacaacagtatttgtgtcaaggcacatcttactgttctttggcggtcttcctctttccattgattttgtcatgacggttgacttttgttgtcaccttcatcttacagattttagctcgaactttggtttccacctgtctccataaagtaaagatgtcttccaggacaattttaattcctggaaaggaagaaactcttttctttgtgtgcatacaaacggacctcagcccttggtgagagtgaggagaggagaaggtgagaaacctgagggcaagaagctgttctttccctttccagggcaaactcatttccacactatggggactccaacagagccataccttcctgtctacggcggttggacctcctggctctctgctgtacatccgtggatccatcatgtccattttgagacgggaagatagtcttcaggaaagacacctaggaaataataatataagaatgacggctgggcacggtggctcatgcgtataatcccagtactttgggaggccgaggcagggtggatcacggggtcaggagttcaagaccagcctggccaagatggtgaaaccccgtctctactaaaaatacaaaaattagccgggcatggcagtgggcgcctgtaatccgagctactcgggaggctgaggcagagaaccatttgaagctgggaggcagagtttgcagtgagccgagatcacaccactgcactccagcctgagcgacagaatgagactctgtcacacacacacacacacacacacacacacacacacacacacacacacacacaaagaatgacatgaggctggcacggtggctcactcctgtaatcccagcactttgggaggccgaggcaggcggatcacctgaggtcgggagtttgagaccagcctcaccaacatggagaaacgctgtctctgctaaaaatacaaaattagccaggcatggtggtgcatgcctgtaatcccagctagtcgggaggctggggcaggagaatcacttgaacccagcaggaaaagattgtggtgagctgagattgtgccattgcactccaacctgggcaacaaaattgaaactctgtctcaaaaaaaaaaaaaaaaaaaataggccaggtgcggtagctcacgcctgtaatcccagcactttgggaggccgaggcgggtgaatcacaaggtcaagagatggagaccatcctgggcaacatggtgaaaccccgtctctactaaaaatacaaaaattagctgagcatggtggcgcacgcctgtagtcccagctactcgggaggctgaggcaggagaactgcttgaacccaggaggcagagggtgcagtgagccaagatcccaccactgcactccagcctggtgacagagtgagactccgtctcaaaaaaaaaaaaaaaaaaaaaaatgacatgaatatacttcacacaactgaactgtacacttcaacacggttagatggtaattatcatcttgtaagtattttaccacaggttaacatgtttcacaacttgaaaaggaagtaattaattaccttcagctctctgagttctagaatttgtaacatttcaccccctgctccttcctgatctgcactggagcatctttcttctgtccctgctctactcagagttcactttcccttccctcacatcagcttcgttgaggctggtttgaacttaacgcaaaacattctcactaatgactgaattcccgccaagatttccatattatcacagtatgcttttaatcttctaagatattaaatatttgttctcatcatagctaaaatgcaatgcaaatcccatctcagatgtgggtcagatacctatgaatctcctgaggtagtcattgaaatgacttttttcttgagacggagtgtcactcaaccatgctgaagtgcagtggcgctaccttggctcacggcaacctccacctcccagattcaagcgattcttgtgcctcggcctcccaagtagctgggattacaggtgcctgctaccatgcctggctaatttttgtctttttagtagagatggggtttcactatgttggcccatctggtcttgaactcctgacctcaagtgatccacctgcctcagcctcccaaagtgctgggattacaggcatgagccaccacacctggcctgaaataatatctttcaaattctttgtagaatttgttttttcctgatttctgcacataggatgaaaaaaaaatcatgtactaggatttcgagagaagcaatgggtaatctaaaaagatgaaaagagaaaccacgtctatcccacagctactgctagatttcataggaaaggtagctggcccagtttggagctaggagaaatgtcaaacacatgaagaaatgagaagcaaagaaatgccatcacacatgaatgcttcatggcacccatgatgtccctgcttaggaggtaatggtatagatgactagatgacaaggacaaagatgagaggtgcaaagttgtccaagtccaatagctcaactgaactttcctaatggaattgttaaaaagtggtaaatttaaaaacttcccctggctcacgtggtggctcacgcttgtaatcccagcactttgggaggctgaggcgggtggatcatttgaggtcgggttttgagactagcctggccaacatggtaaaaccccgactctactaaaaatacacaaattagctgggcatggtggtgggcacctgtaatcccagctacttgagaggctgaggcaggggaatcacttgaagccaggaggtggaggttgcagtgagccgagatcacaccattatactccagcctgggcaacagagggagactcgtcttgggggtgagaaaagaaaaaaaaaaagcttcctccaatttataccgaaaattctctgttcaggactaagtggcatagagaatgttaaatgtgcctagatatcttcataactcatatattttctgttttctacatatcttgaaaggcagtgccaaatgacgtgtaattatctaggcggtaaaactgaaacatacttcctcttcccttgaatatcaaaaagcattgtggtattagtacttttatcttggatcattgttcagaaggaggttcagcccccagacaaccacatttttactgtcatgaatggcaagacaaaatgtagagctcaacttacccaaaggataaaaggctcaaaagacaaattatggcacaacttagcagccaaattcttaccaagtacagacttttgacatactgatctctctccagttgcaagtgggaacatgcactttgaatgatgtcattcaaaattaccctgcccagacacacttttcattgattctcttggagggcagttctaagagattctctggggctttctctgcatcatgagacgcagtgcagttctgcccttcaccttccggcagtttgtcacctcgtccctatgacctccgaggaactttgtctcaggccaactgtttgttccttgggctctttcatttcccctaaaaatcatttgctgcccctctaaatggcctacatctccatctatctccctctcccctcagaagagggtgctctttaagcatcaaccatccagcccttctagcagtctcatttttcagctggttcccatgtttatgtctgttctatgtttttcttttcctgttaagctgtctgttgtcagctcatttctgcagtgaatcttcagagaggagattggaagctttccttccacccatacgatagaactataaagcagaagagtttagaaagactttcccatttaagtgacgaaacctcatactccatttgtgacaaatagcacaaaggttaaaaaaacttatttttgaccaaaagctctgttgacattctattaaacaccgacctatttaattttcataatgtaaatggcagatattttcataattcttatgctaataaatcatttccctgattttttgggtaaaaccacatattcacaatgaagtccagaaacgtgaattgtttcatataatttactcttatttgtgattacaagtatacctctacagaaagttagtatactcacacaaaggtaacttgtgcagagggagatggcaaatttataacttctcagaaacacagtaatgataagtaaccaaggacttccaccaaagtcagtcccacgatgacgatggtcagccagagtattgataacctggaataataatagttgaaataatgaaaaggtcaatgacactgacaatatttcactcagaaagaatcatccttagaaaccgtcaacctcctccaaaaggtaaccacatccctcagatatcaccatgggattccactgctacaaaaaagaacagaagttagagaagtctcatgtttttcagatggctggtagtgtttttaggcattgcaaatgtggggtgttgtcattcttggtataaagcagggatatccaatcttttgacttccctgcctatattaaaagaagcaaagttgtcttgagccacacataacatacactaacaatagctgatgatctaaaaaaaaaaactttttttcttttttttttttgagacagagttccgctccactcagtcgcccaggctggagtgcagtggtgcaatcttggctcactgcaacctccagctcctgggctcaagccattctcctgcctcagcctcccgagcagctgagattaccggtctctgccaccatgcccgactaatttttgtatttttagtagagatgaggtttcaccatgttggccagtctggccttgaactcctgacaggagatctgcctgcctcggcctcccaaagtgctgggattacaggtgtgagccaccgtgcccggccattttttttgtttttgtttgttgtttgtttttgagatggggtctcactctgtcacccaggctggagtgcagtggtgtgctctcggctcactgcaacctctgcctctcaggttcaagtgattctcctgcctcagcctcctgagtagctgggagtacaggtgcctgacagtgcactcagcaaatttttgtattttttgtggagatggggttttgccatgttggccagggtggtctcgaactcctgacctcaggtaatctgcccgcctcagcctcccaaagtgctgggattacaggcatgagccactgtacctggccaaaatctcctaatgttttaagaaagtttacaaatttgtgttgaactgcattcaaaactgtcctgggccacatgcagcccgtcactcatgggtaagacaagctaagtataaagtaattatcttttcttttctttttgttttgagacaaagtcttgctctgtcgcccaggctagattgcagtggcatgatctcagctcactgcaacctccgcctcccgggttcaagcgattctcctgcctcagctactgagtaactgggattacaggcgcctgccaccacgctcggctaatttttgtctttttagtagaaacagggtttcaccatcttggccaggctggtctccaactcctgacctcatgatccacctgcctcggcctcccaaagtgctgggaatacaggtgtgagccactgcacttggccagtagttatcttttctttaattatttgttttttaaattgatgtataacattggatgcatttattacatatcacatggtaaaagaatccctctaaataatacttctctcttggattacatgaatctttgtcatttaaagctcagtataagtaaaaaaaaaaaaatacaatgaagagattacttcattcacaaataagtatcgaattttagtgcttaaaaattaacaaggtgggccgggcgtggtggcttacgcctgcaatcccagcactttgggaagccaaggtgggtggaccgtgagatcaggagattgagaccatcctagctaacacggtgaaacccatctctactaaaaatacaaaaaattagcagggcatggtggcacgcgcctatagttccagctacttgggaggctgaggcagaagaatcacttgaacccgtgaggcagaggttgcagtgagccgagatcgcaccactgcacttcagcctgggtgacagagtgagactctgtctgaaaaaaaaaaaaaaaattaccaaggtggagatcatgaaaatggcatgaatagtgtgggatttctctaagattgttgatattaattccattagactcttatgtgagtgaagacgaagacttcccctgagtaagttcagacagcttgtgataacatttctacatcaattcctcaggatttaactatatattcttgaaaacatctcaattttaagtgtttctttcaagatggtgaattaaacagagatagcccttcaacaggttgaactcagcatatgctgagtctgaaatggaaatgatggagttagagaaccatacaacaatggtaatgatttcagaaacatggtgttgagcagaacaaagcagacacaaaagagtacctatggcatggcatgcatctgtatacgcgaaattccagaataagcaagctaacctatgataagaaagagactggctgggaagagtgagagttcactttctggggtgacataatagtgtagatcttggctgggcacggtggttcacgcctgtaatcccaacactttgggaggccgaggcgggcggatcacctgaggtcgggagttcaaaaccagcctgaccaacatggagaaaccctatctctactaaaaatacaaaattagctgggagtggtggcacatgtctgtaatcccagccactcgggaggctgaggcaggagaatcgctcgaacctgggaagcagaggttgcggtgagctgatattgccccattgcactccagcctcagcaacaagggagaaactgtctcaaataaataaataaataaataaataaaataatgtagatcttgaacgggggttggtttatgctggtgtatgtactttccaaagttagtaaacttacacttgaggttatatattttggccaggcgcggtggctcacgcctgtaattccagcactgggaggccgaggcaggcggatcacgaggtcaagagatggagactatcctggcgaacatggtgaaacccagtgtctactaaaaatacaaaaattagccaggcgttgtaatctgagctactcaggaggctgaggcaggacaattgcttgaaccccggaagcggaggttgcagtgagccgagatcttgccactgcactccagcctgggcgacagagtgagactctgtctaaaaaacaaacaaacaaaaaaaagtcatcaaaccagatgacacaaatcaaatgacatttcactttgttttggtccgttttgtctgttggagacaagagtgcagcggggccatctcggctcactgcaacgtccagctcctgggcccaagcgatcctcccacctcagcctctccagtaactgggataacaggtacgcaccaccaggcccgactaatcttttttggaattttttgtagagatggggtttcgctatgatgccctggctagtcttcaactcctggactcaagtgatctgcccacctcggccccctaaagtgctgggattacaggcctgagctgtgtaatttcatgccgcgtgacacagcccagtaaaaaggaagaaaccccgcgggtccagcgtctactcacacaggtggactgatggctgataaatcccagcaggagccaaaagagcagccacagcacccatctactcacacaggtggactgatggctgataaatcccagcaggagccaaaagaggagccaaaagagtagccaccgcacccgcatgtcctggtcctttcagggctccctgaggcggccaggacagaggtggaggtggcttagggcaggggggagggaaggggacggggaccggggccggatctgagttggggagggggaggggagggggaggggaaggggaggggaaggggggaagtaagggaagggaaaggaggagaagggggctgttggggaggaggaggaggagaagaagaaaggggtctgggaaaggatccggttcaaattaagttctcaagcgctggtggaaggtttagctacaggtcacggagaagatcagggaagcaacaggacaggcagggcaagggagcgtgaggcttaggagcaattagagggagacaaaggttctgctttccaccaaaccttcttcggtctgggccctcccttagcaaccctggggctttagactctctctccaccaatccctgatgaccccggtggtgcctcacaatggacattccaagtagcgcccgcatcatcccaatgacccctcccccatctcagtcccccacgctcctcccaaggccaggtcctctctggaaccttcacaaacctgacttctggtcctccccaaccagctccctgtccctgcttctgggcgctccttccttcctgagctcccagggttcctcaaggtcacttttggcgacaaaacataaaaaacaaatgatggcaggatggcaggaagaacctcatacccaagcagagtgccaggttttacagcctccgctcagccattcatatcctaagcaacaaaacatcagcaggatgcggaaggtcccgatagtaaaccatctccatcacatccatgtagccatccgtccatcaacctgtatctcaggaacaaatgtacatacattcattttaagcatgcatggtacatttacaaaaattaacctgacttattttgttccagcaaatctcaatatatttgagagcaatcaaatcacacagcatgtttctgatcataaaactgtgctagaagtcaatgattaaaagctaattcaaaattattatttgcttggaaattcaaagtgcccttataagacataaacataagaaagaatccaaaatgaaacaagattgcctttcaactcaatgatgagatcataacatggcaataaaatgtctccctctggccggggaattcctctttgtggcacaacgttgtgtgatctcaaatcacccctaacccacctagacattttaacatccaaaaccgagtgatgatgtccttatctatatcatcttactgcccgtgtgtgtggactttaaattctgaacccaaatgagggggagaaaaccaagctgactttcatgactgagctctcagggacgtccaaggaatctgtgcatttcaagaaacaaagttcatcagcttctctcctaaggtatttgcccacaatagccagagggcttggccgcatcatgtgtgatgggtggggagctccaagcaggtgggcaggacccaggggcctggtgaccaggacagacccccactgtccatcacctttcctggccctgtcctcagctaaacttcccacaggccttctgcccgatcacacagagtgtgcccaaactcactcaggcctctggcagctgaaaaccactgctttaaatccctttaccatttactatgacataaggttattgtaaacaggaaatattctattgatgctacaaatggaaagccaatgcctttaccataaatagaaaaacaaccctaagaaacaagcaaaacaggggctgggggtggtggctcacgcctgtaatcccagcactttgggaggctgaggcgggcggatcacaaggtcaggagttccagaccagcctggccaatatggtgaaaccctgtctctaataaaatacaaaaattagctgggtgtggtggtgggcgcctgtagtcccacctacttggaaggctgaggcaggagaatagtttgaacccgggaggcagagtctgcagtgagccgagattgcaccactgcactccagcctaggtgacagagcgagactctgtctcaaaaacagcaacaactacaaacaaacaaaaaacagggttaacaaaagtatggaattcaattctttttatatgctgcagccatgttccagccctagatttggctgggcatggtggctcacgcctgtaatcccagcactttgggaggctgaggcaggcggatcacgaggttaggggttgacacgagcctggccaatatggtgaaaccccatctctgctaagaatacaaaaattagctgggcatggtggtgcacacctgtagtcccagctactcagaggctgaggcagaggaattgcttgaacccgggagacggaggttgcagtgagccaagattgtgccattgcactccagcctgggggacagagtgaaactctgtctcaaaaaaaaaaaaaaaaaatatatatatatatatatgtgtgtgtgtgtgtgtctgtctgtgtgtgtgtgtgtatctatataaatctcaaaaataaaagatcatttttgagattatcattttaaaagacaagataatgttcaacttaatgaataatttaattattactactggactttttgtagactgcacagagcattcaaaacaaatgaaggagaataaaaaatatgtattacatgttgtaaaataaatatgatgtggttaattcttttattcaaaattatagaacatatatatgtactgtagaatgtatttcttattatgagtcatgttaaaaagtagtttagaagctgttgatttgaatttccttttcaaattttgcaggataatttttttttttttttgacagagtctcgctctgtcgcccagtctggagtgcaatggcgtgatctcggcccactaaaacctccacctcctgaatctcagcaattctcctgtctcagcctcctgagtagctgggactacaggctgacaccaccatgcccggctaatttttgtatttttaatagggacgaggttttgccatattggtcaggctggtctcgaagtcctggcctctggtgatccaccagcctcagcctcccaaaatgctgggattacaggcatgagtcaccatgcccagcctaaacttggcaagataataaataaccttttaaagtgtcgttgggcacttgtctggttgtttttctttaggttaccatgccagcaatgattccttttgagtttctgacagaagatagtggttttcatccaaataagtcaactactctaccccatccctaagccacttgtatggaaagaaaaagaggaagaagccagtactgagactgcgtaagcttcccccagcatcacccgctatgagatgtgtggcagctgagacccgggaactgctcaagggcaccaggccccatctgtctgcactcactcaccttcctcaggtactcgcatgggcatgtcactgactttacgtgctgctgcagctccttggtgagctggccctggtcatgggacaggaaccgtggggtcaggacaatagagagcttcaccatttgcagaatgagaacaggggctcatgatgagtgccaacctattagacaattaaaaaaaaaagtgttgaatgagtggaaaaacaaggtgatgtttgagtctatagtggtcaagggcttcagaaaaggacagaaccaagttcaaattcctgtactttgaatttctacttcatgccatgcaaaattactttaccccttttaacctcagttttcttctgtgtgaaacaggaacaatagtttcattcgtcattcagtttctctcaaggtttcacgagatcatacctataaaacatccaagtcatttaaatgtatcatcatttcggtcataattagtgggatccatttcactattattggatatacagttctgtgcctgaaacctacaaagaaagaaaatgttaagtctaaaaagcattagtgatttctcatttttatattactaattataaccctatttaatcacacaaggccttgtccgcggcaggtgctcaataaacacttgtcgaatcaatgcatgtgggctccggagccacactgtttagattctattctgcctccaccacttatcagctgtgtgatctgggtaagataattcacctctttatgtctgcacttccctctccataaactatatataacgagaatccttagctcatttggttgtggtgaggggtgaatgatttggcacacaggaggggcttgttaacattagctgtgatgatctccttccaaatcttcattttcagagccacagatgaggccatagggcaaccaggtgaccttagagtgtaagtacacatgatcgccagctatgctctatctccaccataggtccaagactgggtagttctggcctggaggcttctgctgcatctgccttctcagtgttcacctaatgacttttgtattttcctcctcacatccccacagatggggttcaggctgccgaacacagctgggtgatgccagggcagtggccacctgtgccagccctgtgaggtagctggaggatcattgttccttccttctcgggctctgggcagatgccagggctggggtgacccatgacctcaagtttcttgctttggagggccacattttcccttggcaaagagggtaaaggtcacaggatgccggagagctgtgacttctctgtgccctgggcccaaactatgaagacctgacacactatgctaaaagtccaaggctggatgctccccagagcttcttgcctcaccgcttctgctgagggaggaatgaatactatgtcctcccagagctttgggagcttgtagcaagcagcctccccagcgcaaaatctcttggaaacctctaactgtgtcggaaacattagtgcaaatgttgcatcctatttcccatatgtccgcgtgttttaggaaaaaaccctcaatttcctaaatatgcaagaaaaattggtattgtaggacaatgtgactttttaaaaaatgttatttaaacatcttccccacctccttttctgccctccaagactgccaaatacttgttgaacaaatattattaaatgcctactacgtgccagccatgattcatggtcttggggacacagcagagaacgaactgacaggattcctcccttatgtaattcacattcttatatgataatgataagggttaacattaattaagctgtcactacgtgttagtcacggtgcagtcattcccacacattattacacttaaacctgctagcaagcttgcaaggtagttagttgtttttcctttaaaaactgagtctcagaatgatgaagcactttgtccaatgtcacacagctagtaagtgtggagaccttgcatccaatcaatgcccgtctcattctaaacaccacattatgtgttctccagcccatggagaataattttaacacagtcaatgaaatttctacacaacaatgttcttgtctcaagtccaagaatgcctcctacacctcccataatactggctttctggtgagtaaagatgccattctcatgtgtaatcaggtggcaaatggagatatgaccaaagtaaccatttgcctacactcgtaaccctgtacacactcttcctgtgtcgattcaattcaagtaccccttttgatcacttagcaaatctgacctttaaaagggttaaggtttttatatccatgtaagtttctgtattgctttggaagtctctggttaaatgaataccctttttaatagtgacctgtgattctgttttgatcaagtgtttacaaacttgacatctttgatgggtttctccagtgtcaaaatcctaaatcaggtctttttggcttaaaattaactttgggatttttcagctgcatcccttcgggagtctaaagaatgcatctctcatcttgtagaggtattaagtgattcgatttatttggtagattatatgggcgggcattgtcaaatgtggtgatactgcatgggagggcactgtcaagtgaggtgacattagatctcatctcagttatatttatgggtatgttgttgatatacgtgttccaaaaattacatacatttatacaaatttaatatgttatgatttgtaattttgattgttatgctaaatatttgctaaagtttagctttagcaatattatgctaaatatatgctaaatatttgctaaagttatatttgcataaacatgttatgaatggctgggcaccatcactcatgcctataatcccagcactttgggagaccaaggcaggtggatcacctgaggtcaggagttcaagaccagcctgaccaatagggtgaaaattacacgaaaatactgtctccatgaaaaatacaaaaattagccaggcttggtagcacaggcctgtcatctcagcaactcgggaggctgagataggagaattgcttgaacccaggaggcggaggttgcagtgagccgagattgcaccactgcactccagcctgggcgacagagctggaatctatctaaaaaaaaaaaaaaaagttattaattatttctgaagatgatatgaaatttataaaacactggtggtcctgatgtaatgctgtcagtcatgattctgatcactgtcttaaaatgctgcacataagataagtaattggctgggcacagtggctcacacctgtaatcccagcactctgggaggccgaggcgggtggatcacgaggtcaggaaatcgagaccatcctggctaacacggtgaaacctcgtctctactaaaaacacacaaaaaaaaaattagccgggcatggtggcgggtacctgtagtcccagctacttgggaggctgagaggctgaggcaggagaatggcatgaccctaggaggtggagcatgcagtgagcggagatcacgtcactgcactccagcctgggtgacacagtgagactccgtctcaaaaaaaaaaaaaaaaaaagtaattaaatttccttgtgaactgggaagtttcatcagacttttatcataactattgttttcatcatccacagttagttttgaattcttctctaaaaatatttgtaattggcagtagtccaaattttcttttgttttctttcctgtttttgagacacagtctggctctgtcgcctaagctggagtacagtggtgccatcttggctctctgcaacctctgcctcctgggttcaagcgattctcctgcctcagcctcccaagtagctgggactacagtcgcccgccaccacgcccagctaactggtggtggtacagacggggttttaccatattggcccggctggtcttcaactcctgacctcgtgatccgcccgcctcagcctcccaaagcgctgggattacagccgtggagccaccgcgcccggcccccaaatttgctttgcatggagaaaactctaacaaatcctcttgaacatggttttctgataacccagatcaatgaactacccaggcttcaccactataggcatgtgagaaactcgcacttataccccctcaatacattaaaactaaatatttttttaaaaatcaatgggccaggcgcagtggctcacgcctgtaatctcagcactttgggaggccaaggcaggcggatcacttgcggttaggagttccagaccagcctggccagcccatcttactaaaaatacaaaaattagccaggcatggtggtgcatgtctgtaatcccagctactcgggaggctgaggcatgagaatcgcttgaacctgggaggcagaggttgcagtgaaccaaaattgtgccactgcactccagcctgggcgacagactgagactctgtctcagaaataaaaaaaataaaaaccaatgaactaaaaaccaatttctagtggcttctaataaggaaacaatggttcaaaaaactgctaagcaagatcaagcaaaacaaaaaaatctattaagataatgtttttataattcgtatttaaaacattgttgtttgttgattcttgattcattctttttttttttttttgagacggagtctcactctgtcacccaggctggagtgcagtggcgggatttctgctcagtgcaacctccgcctcctgagttcaagccattctcctgcctcagccccccgagtagctgggattaccggcgcccgccaccacgcccagctagtttttgtatttgtagtggagaccgggtttcaccatgttggccaggctggtctccaactgctgatttcaggtgatcacccccccgcctgggcctcccaaagtgctgggattgcaggcgtgagccgccgcgccgggcccttgttttgttttctagattgaagaaaattttttctcagaagttatctagaatttacaccgatttggtaaagcacacttttgtgaacaaaggtgggtggaagcgtttgtttttccttcctacttgatccttccaaagtttggaaactattcataaatattcttactttgatgtacacatgttctccttataagcaggctgtaatcagaatgattggttatattatcaaggctttgactgaaacatcctatttaagaatacgcagaaaatgcctggcttcgagtttgcagccttacgttccagtcagggggaaactgtcactccctgcaggcctgagaacctgagagcttttccgggagcaacttggcagggagggtcccggcagctgctccgtgggcaggaaccatggggcgcagccccgggcgaccctcgggccggcggggaccttccgcttcctggcgtctttctccatcgccccgccggctgctggggaagcggcgggtgcccagtgcctggaggtcgctctctccccacctctggctgcgggaacggagaggccgcggcggccggagcagggtgggcggcctgaggcgagagcccagccggcctccgcggggaatatggcgacctgcggcgagctgagcgtcaactgctgcgccgccgacttctcggagcagcgaaggcgactcgagagaagacgccgccaagtggaacccgggccccgcggccctgggatggggcagcagccactgcagccaggaagccctgggcggggcgctgggcgccaacgagcgtcacggcaacctccatgcggcgccctcaccagcctacaggcggcaccgcagcagcctccaggcagcgcccacaccagcctacaggggtcgccgctcgcactgcacctgcctccgccgccccggggtgtgaactgcgctgtctgtcggcctggctacgctgacccgggcagcccaggcccgcagcagccggacgaggagcccagggccactgcccggggttacgagaaggagcaggacggtgccccagaaaaatgcaagagctcagagctagggcccccgtgccaggaaaggctaggagcagaagatggagagatggagatggagaagcggcaggtgggaaggagcggcgctccaccggtggggtcagcatgcgctggcggggcttagagtatgaagaggaagaagctgggcagaaagagcggaaacgagaaggtgcaatgacacaacagagcacaatgcagaatccagccctaggactccaataaaggctgggtttaattgcaactcacacaccccacccctaatcagagaggatcaggggagagagaggacccaaggaacactggaacctgaagggcgggaatctgaggccaagactgattgttggaaattgtgggcatcaggaaaggagaaagtgagtcagaatgggtggaccgagggtggtgttggggcggggggggcagtgaactgggttaggaaggattagaaatcagaaccttaggaaggatccagaaaggaactgtccttaaaaaggtgcatgctgcggctgggtactgtggctcacgcctgtaatcccagcactttgggaggctgaggcgggcagatcacgaggtcaggagatggagatcatcctggctaacacagtgaaaccccgtctgtactaaaaatacaaaaaattagccaggcgcggtggcaggtgcctgtagtcccagctacttgggaggctgaggcaggagaatggcgtgaacccgggaggtggagcttgcagtgagctgagatcacaccactgcgctccagcctgggtgacagagcgagactccatctccgaaaaaacaaaaacaaaaattagccgggcatggtggcacatgcctgcagtcccagctactcgcgaggctgaggcaagagaatcgcttgaaccagggggaaggaggttgcagtgagccgagactgcgctactgcacttcagcctgggagacagagtgagactcctcagaaaaactgctttcttccaacttacaaaagccggaagaagaaaatgtcatttattttcatggtaggagatttatgccaagattgtacaccaggtggagacctgtaccagctccctctgctcccatctcccagagttctaggaatttactcttgcacactggctctttcatgtctcttcgactttgcctacggaggtctctctgcctagcatgccttctctccatgtctcaccattatcctccggctttatttatttatttatttatttatttatttatttttattgtttgagaaagtgtctgactttaccttccaggctggagtgcagtggcgtggtcactgttgactgcagcctcaaattcctgggctcaagaaatcctcccgtctcagcctcccaagtaggtatgcatcgccacacccaactagttttttaatttgtgtgtgtgtgtttggtagagatggtagagatgttgcccaggctggtctcaaactcctgggccccactgatcctcccacctaagcctcccaaagtgcagagattacaggtatgagccaccacacacacccagcctctccatctgttttatttatttatttatttatttatttttgagacagagtctccccctatgccccacactggtgtgcagtggcgcaatcttgggttcaccgcaacatttgactcccgggttcaagtgattctcctgcctcagcttccagggtagctgggattacaggcgtgcaccatcatgcccagctaatttttctgtttttagtagagacggggttttgccatgttggccaggctggtctcaaactcctgacctcaagggatgcacctgcctcagcctcccaaagtgctgagattacaggcctgagccaccatgccctgctactgcacccagctactcaaggcacatatggagccaacatacttgaccatctgcaggggtccacccagggtaggggagctatgagcactggcgtcggagggagcccagcttattggcccaaccccgagatagacccatttcccagtgggcatagcactccaaggcttgtcactcacagcctctgcaactccaagtcttggtatgcctgaaacccatactccacatgagcacaccttcactgagcacctagtgtgggacagataggccagggctgagcacacaagaggaaggagacgcagactttgccttgaggagatcacgttcaggcagggacagaattactccagagtgtcgcaggcaaagggaccaaagcctcggattttcttttcttttttttttttttaatttttttgagatggagtttcactcttgtttcccaggctggagtgcaatggcatgatctcggctcactgaaacctctgcctcctgggttcaagcgattctcctgcctcagcctcctgtgtagctgggattacaggcacccaccaccacacccagctaattttttgcatttttactagagacagggtttcaccatactggccaggctggtctcaaattcctgacctcaggtgatccacctacctaggcctcctaaagtgctgggatctcaggtgtgagccaccgtgcccagccgtctccaatagaaggaggcagagagaggtttggcacccaacagaaatgagtttaaatcttggttcccctggttcttggctcaagcttctctggtgcccagtgccttcctatgaaagggaatgagaggggtctggggttgtgacaaaatcatgtttctagtgctgggcaaggtgatatgcacctgtaatatcagcaactcaggagcctgaggagggaggattgcttgaggtcagaaattcaagcccaggccgggtgtagtggcacacaactgtaatcctagcactttgggaggccgaggtgggcagatcacctaaggtcaggagtttgagaccagcctggccaacgtggtgaaatcgcagctctactaaacatacaaaaagtagctgggcatagtggcgggcagctgtagtcccagctactcccaacctgggaggcagaggttgcagtgagccaagatcgtgccactgcactgcagcctgggcgacaagagcaaaactccatctcaaaaaataaaaaaataataataaataaaataaatgaataaataaataaaataaaaataaaaataaattcaagcttagcctgggcaacaggctcaaccccatctcaaaaaaaaaaaaaaaaaaaaaaaaaggccaggcatggtggctcacacctgtaatctcagcactttgggaggccaaggcaggtggatcacctgaggtcaggagttcaagacgagcctggccaacatgttaaaatcctatctctactaaaaatacaaaaactagctgggcgtggtagcacatgcctatagtcctagctacttgggaggctgaggcaggagaatcactggaacctggaggcagaggttgcaatgagctgagatcacaccactgcactccaggctggacatcagagtgagactctatctccaaaaaaaaaaaaaaaaaaagtagtcaggaagagacatcaacaaaaattggtgatgaatggggtagcagtggcactggggaccaaaagggaacagatattttgcactacaattgtcatctcgtttcttttcttttttttttgagatggagtctccctctgttgccaggctggaatacagtggtgcgaactcggctcactgcaacctccgcctcccgggttcaagcaattctcctgcctcagcctcccgaatagctgagactacaggcacatgccaccatgcccagctaatttttttatttttagtagagacagggtttcaccattttgattaggattgttttgatctcttgaccttctgatctgtccacttcgtcctcccaaagtgctgggattacaggtgtgagccatcacgcctggccaattgtcatctcttttcacttttgagcacatatgggtatgctgtaaaggaaattttaaaatctcaggatcccagccccccatcttcttatgcaaaagagaaagtcattgtgacacccttttccaaatgaatagctgttcctaagatcatgtaacagccagatagatgtccattcagcaagaaaaggcctcaggcatctgggaagggctgcgccccgtagatcattcataaataaattatttgctggcctcctataatcaagtacatgccaatgttaactttaggtctacaatcttttttttttctttgagatggagtctccctctgtcaccgaggctggagtgtacttgtgcagtctgggctcactgcaacctctgcctctcaggctcaagcaattctcttgcctcagccacccgagtagctgggattatgggcgtgtgcctccgcactgggctaatttttgtatttttagtacagatggggttttgtcatgttggccaggctgttttcaaactcctgacctcaggtgatccacccgccttggcctcccgaagtgctggaattacaggtgtgagccactgcacccagctgagtaaatttcttgattgcacagaatgtatggtgatattggtggacttaaggacattgaattgtttatcaggaataaagtattatgtgtgttttctggggtcctggataatgctgtagcattcagggtagattgagtaaaaaaaatgtagagatggtttcctagttacttgtttttgcttctaattttcattcatttgctatttattctcttctggctttgcttgtgtatgcatatatatataaccattattattattattatttttagtttctagtggaaggcttttatttggttctgtgaatagtcattttgtttcctatgtatttctagcaagttgtattcattccattgatctagaattcctaggctgccttcgttgggcctgcaggaattaatggagcatagcagctttttattttttatatttattttttgagacagagtctcacactgtcgcccaggctggagtgcaatggtacgatatcagctcactgcaacctccacctcagaggttcaagtgattctcctgcctcagcctctggaatagctgtgactacaggcacccactaccacacctggctaactttttgtatttttagtggagatggggtttcatcatgttggccaagctggtctcaaactcctgacctcaggtgatccatctgcctcggcctcccaaagtgctgggagtacaggcttgagccacaccgtccagcgagtatactttcataaatagaatttgagtcatatttctgtctctgcctaatttctccaaaatttgtaaactatttgtgaatattcttaattcatgacaatgtgtttgttggcatacagtccaacagggtcaccagggccgatcagggagagagagcctagaaacttgacatgttggcactactgtaactgctcaaggggttcaccttgcccactgcctagacagagccgattcatgaagacaggggaattgtaattgaccaacatggtataatcctgtctctactaaaaaaatacaaaattagctgggaatggtggtgggcatctctaatcccagctacttgggagcctgaggcaggagaaccggttgaactcgggaggcggagattgcagtgagccatgatcgtgccattgcacttcagcctgggtgacagaaagaaagaaagaaagaaagaaggaagggaggaagggaggaaggaagggaagaaagagagagagaaagaaagaaagctgctaacccaagcagaacaaaaaattaattgaataccaaaaaaacactttgctaaattttcatgttaaaacagccgataccaaaattgtttagataaacagtttggtttttgttgttgttgtttgtttttgttttttgctttttgcttttttgagacggagtctcaatctgtcacccaggctggagtgcaatggcgtgattttggctcactgcaacctctgcctcccaggttcaagtgattcttgtacctcagccttctgagtagctgggattacaggtgcccaccactatgcctggctaatttttttgaatttttagtagagacggggtttcaccatgttggtcaggctggtcttgaactcccaacctcaggtgatccacccgccttggcatcccaaagtgctgggattacaggcatgagccaccaccccttttttgttgtttttgaaacagggtctcactctgtcgcccaggctggagtgcagtggagcaatctcccctcactgaaacctccttctcctgggttcaagggattctcccatctcctcccaagtagctgggattacaggcttctgccaccatgcccagctaattttttgtgggctcgcccagcctaggtatacaatttgaatgaactccaaggtctaagtcaaattacctatgataacccattaggtatcagtgctatgcacgtaaactggagaaacaactgatattcagagcacgcaagtccgatgttaaccatggactcatggagaatcaagatggtcaccttgtccttcctgactccttaaagtgtttgttattaaaggttctgcagttgggcgtggtagctcacacctgtaatcccagcactttgggaggccgaggtgggcaaatcacctgaggtcgggagttcaatatcagcctcaccaacatggagaaaccccatctctactaaaaatacaaaaaattatccgggcgtggtggctcatgcctgtaatcccagctactcaggaggctgaggcagaagagtcgcttgaacccaggaggcggaggttgcggtgagccgagatagcgccattgcactccaacctgggcaacaagaatgaaactctgtctaaaaatgaaaaataaaagactctgcattccatgactcatcatggaaaagataaaatgatctaaattaaatatgtattggtgtgctgaattataaattgctaaaatagttcataaccaatgtttcgtttgtcaaattcatgttcctgggaagacaatcaaagcttcaggtgcatttggctacctcatgggccatttgaacatttcagttgtcaattatcattttcaatgcatgttttctggttgctttcccatgcaagagggctgatattacaacagtagatcattatggtacagtgtattttcaccaggtactgaaagctttttatggctcactgactggggacaatcaattccttcacaatctagaaccaaagattggatcttctgagaacatcagagaaagaatgtccttgccatccacaatacagcaaaacttcaggaccttgaactttgggttcataatctcacaagagggaagtttttcgccagaaaaagatggcatccttgatgtgaacagcttttcccaagatcacagatcaagacttctagtttttttttttgagacagagtcatttttttttttttttgagacatagtctcggtcttgttgctcaggttggagtggaatagcgcgatcttggctcactgcaacctccgcctcctgggttcaagtaattctcctgactcagcctccagagtagctgggattacaggcgcccaccaccatgcccggctaatttttttgtatttttagtggagacagggtttcaccatgttggccaggctggtctcgaactcctgacctcaggtgatccgcctacctcggcctcccaaagcgctgggattacaggcatcagtcaccgtgcccggccttgtgatagtgtcttactctggcacccaggctggagtgcagtggtgcaatcttggttcactgcaaccttcgcctcccagattcaagcgattcttgtacatcagcctcccgagccgctgagactacaggcacgtgccaccatgcctggttaattttgtgtgtgtgtgtgtgtgtatgtttgtgtgtgatggagttttgctcttgttgcccaggctggagtgcagtggtgcgatcttcgctcactgcaacgtctgcctcccgggttcaagcgattctcctgcctcgggctcctgagtagttgggattataggcgctcaacaccatacccggggaattttttgtatttttagtagagacggggtttcatcatgttggccaggttggtctccaactcctgacctcaggtgatccacccgcctcggtgtcccaaagtgctgggattacaggcgtgagccctgtgcccagcctcagtgtctctctctctctcgactagagagactgaccagggacaatcaactctctccagactgacagagagagagacagagagagcgagaaagagacagagtctggctctcacccaggctggagtgcagtggtgtgatcttggctcactgcaacctctgccttccgtgttcaagcgattcctgtgcctcagcctcccaagtagctgggattataggtccacaccaccacgcccggctaatttttgtgtttttagtagagacagcctcaccatgttggccaggctggttttgaactcctgacctcaggtgatccgccagcctcggccttccaaagtgctgggattacaggcgtgagtcaccgcgcccggccaaataaaataaaatgttaaagcaaattcaggactacccctcctccaagtcttctgttccctttgggcgcccaggtgagcgggggaggggctgggggagtaataacatcaaaagagcgccttttcctcccttattccgaggagacttccctgggcctgactcccggtcctgtccccagcgccccgcggcctctggagccccttcagtgaccaagatacagagatcaggacgcctttgcgccgccccaggtgcccgcccctagctggctctgcttgggccgcgagggaaggtgaggtcgggggcggagccggggcgtgacagccggggtgtgtgtccgccgggcttggtgcctccggtggccctgcagcaccgtcccacctctgccaccctccgatggggccgctacctgtgtgcctgccaatcatgctgctcctgctactgccgtcgctgctgctgctgctgcttctacctggccccgggtccggcgagggtgagtgaggaaggggctttcccggaactcaggcgttccggtattcctccagcccttcctagggacccagcagccctgcctcccatccctctccaagttcctagttgccctagagcccccagctcgctcttctaatgctcacccacacgatgcgccccagccttctgcagggccccccactcactcctcccagggacccagaactagcccagtccttccccaggggcgcagagtcctctcctggctccctcccctaaccggctgtgaccctctccggcagcccggaagcctcccggttgtcctgatctggggtccgcgaacttacccttcattccacctgtccctgagatgtgagacaccagagggtgggaggagcaggggcagaaagggccggcttgggggtgggagaagaatatattgtgcccctgtacaacaaaccccggtgaccaaaaacaaaacaaaacaaaacaaacaaacaaaaaaacaaaaaatagaacatactgtccctatctcactatccatcctttggggtcactgtagagaggtcccgtgggtgactgcccatttctggggtgcacagatacatgtacccgcagagtactatgcagacaccgccagcacacagatgcgcaggcacaggaccagccccagactcacctggccctcaggtgtgcggctcccacagggaaaaatactgacataccgctagggggacacacgcacacacagctcaaggatacccgagacagcactcaggacaattcagatgcaccgtgtacacacacacacacacacacacacacacacacacacacacacacacacacagagcagcacagacacacatatgtgcgcatagaccctggggtcacaggatggacagacagccctggccctcccccgaggaggctgcagcgggcagacagggcaaacagaccccagcgtgacctgccacacctatgttggcacagagggagtgttttgcttggttataagcacagtgctcatgcctgccccacgcctagaaccctccctctataaggctgttgctagggctctgagataccagagagtggtcagggacggtggcaggggaacctttggggacagcttcagggtacggtgttgggactgggacattgtcagggtgctcagacagggcgtgttccctgggtcttggtgcatttagaggtcaagggaccatttctggaagctcactgtgtgccagggcagcttatatcagagctcagctcttttttttttttttttttgagacagagtctcactgttgcccaggctggagtgcagtggtacgagctcggctcactgcaacctccacctcccgggttcaagcgattctcctgcctcagcctcccaagtagctgggattacaggcgtgcaccaccatgcccagctaattatgtatttttcgtagaaacagctttctccatgttggtcaggctggtctggaactgctcacttcaggtgatctgcccgcctcggactcccaaagtgctgggattacaggcgtgagccaccgcgcccggccccaaatgcgttttacattttcttcctctttgattcatctttgtcctccaacataaatatgctactttttccactgataaaaagacaaaatggaatttcaatctggcctggacttctcaaaaaagtcagtgtgatgaaaactgttctagataaaacagaaatgagactgggcatggtggctcatgcctggaatcccagcgccttcggaggccaaggcaggagaatcacttgaggccaggagtttgtgaacagcctgggcaacatagtgagaccccatatctactaaaaatttaaaaattagctgggcatggtggtgcatgcccgtatgtctggagactgaggcaggaggattgcttgagcccaggatttggaggctgcagtgaactgattgtgccactgcactccagtgtgggtgacaaagtgagacactgtctctaaaaaaaaaaaaaagagagacaagatgatcaggatgagcgcagtggctcatgcctataatcccagcactttgggaggccaaaccaggtggatcatatgaggtcaggagttcgagaccagcctggccaagatggtgaaacccctttctactaaaaatacaaaaattagctgggtgtggtgtcgcacgcctgtgatcccagctactcgggaggctaaggcaggagaattgcttgaacctgggaggcagaggttgctgtgagcaagattaaaccactgtgctccagcctgggcaacaagaatgagactgtgtctcaaaaaaaaaaaaaaaagatgatcaaacacaatgcgtcaacctcccagagctgtataaaccctaaccctaacccaggaagcaggcaagcctgtgtgtgagtttccactctattgctggtactactcggctctggcaaccccgaaggccaccttcccctgttgtcactgtgtaaggaggaaggagcactggtttgcaagtcagaagcctgggttgaagcctctgctcgggttcctgctggctgtgggaatgtggggttacctttcccggctggcctcgtttcctacatgtccaatgcaggggttccagtcacatgcattgggcaccattacatgtccaagctgtgccaggatctagaaaaatggctgggctcaggccaaggggccttcctgtctggcagtgaaaataagaggagataccaagggccctgagtctgagtctggaggggaagtcatgagcacagggcagtgccagggcccgggagctgccacagaggagcccaccttggtgacagacacctgtaggcgcgtccgtgatgcccagttcccaacacagggaactggacaaacgtttcatgcacgactcttttttcccttcttggctaccttgaggaccttgattataatagttagccttttttttttctttttttgagactcttgctctgtcacccaggttggaatgcagtggcaaaatcttggctcactgcaaccttcatctctcaggttcaagtgactctccttcctcagcctccctagtagctgggattacaggcatgaaccactatgctcggctaatttttgtatttttactacagatggggtttcaccatgttggccaggctgatcttgaactgctgacctcaggtgatctgcccgcctgggcctcccaaaatgttgggattacaggtgtgagccactgagcccagccggattataatagccttttcatgcaccaggggctttatactcattatctcatttcattcatatgagttgaagtcagtttatcccccatttcacagatgaggaaaccaaggcccagagaggttaagaatttgtccaaggtcacacagccaggaagtaggattcaaacccagacagccaggctgtaatacctaggctcttctcaggctcatgcccttcccaggggtctgggaagccctgacctgcagcctgtcacctttgtttaccccccagcctccaggatattacgtgtgcaccggcgtgggatcctggaactggcaggaactgtgggttgtgttggtccccgaacccccatcgcctatatgaaatatggttgcttttgtggcttgggaggccatggccagccccgcgatgccattgactggtgagtgcatgcctgggaccaggccacaaaatccctcacactctggggtagtcaaggcttatgaggaagtacccaaaactgaagctggggtttggtccagggagatcccagtgtgcagtactactttgcaggcaggcagagggctcttggataacatggccagtgaagccagatcttggtaccagctgccccttaccctggccttgagctgatgacgttgccttaaaaacttggctaggagctgtggctcactcctgtaatcccagcactttggaaggccgaggtgggcagatcacttgaggtcaggagttcaagaccagcctggccaatatggtgaaaccccatctgtactaaaaatgcaaaaattagctgtgtgtggtggcaggcgtctgtaatcccagctactcaggagaccgaggcaggagaattgcttcaacccaggaggtggagtttgcagtgagttgagattgcaccactgcattccaacctgggtgacagtgcgagaccctgtctcaaaagaaaaaaataataaaaatataaagtgaccaggtgtggtgattcacacctgtaatcccaccactttgggtcgaagcagtaatatcactggagaccaggagtttgaaaccagcctaggcaacatagtgagaccctgtctctatattaaacacacacacacacacacacacacacacacacacacacacacacacacacaaaggaagccagactatgcactaggaactgccctgggaatccctttgcgttctcacaacaatcccatttcacagatgaagaaaccaaggcacagaaatattcagtaacgtgtccaggtgcggtggctcacgcctgtaatcccagtattttgggaggccaaggcaggtggatcacgaggtcaggagttccagaccagcctggccaacacggcgaaaccctgtctctactaaaactacaaaattagccaggcatggtggcgcatgcctgtaatcccagctactcgggaggctgaggcaggagaatcacctgaacccaggaggtggaggttgcagtgagccaagatcgtgccattgcactccagcctgagtgggattacaggcatgagccactgagcctggcctggtgagctaatttttaaatttgttatagagacaagagagacaagagttttcttatgttgcccaggctggtctcgaccccctgatctcaagtgatcctcccaccttagcctcccaaagtgctgggattacagatgggtgtcaccgcacctggcctctaaggagggtttcattataaacctaccctgaagggagggaatccgattttatgagagggtgtagcctggtgaggcctggatgacctccagaggcaggggcttgtgcctgggctgaggcctaagggtcaatgggcagacatgaagttgccccaggcagagggtacagtgtgggcaaagtcaggaagtggcagggcttggatcactccaggaagagagaggagtcatgtgtcacaggagctcgagacccagagagggaggcaggcaggcaggcagggaccaagctt

SEQ ID NO: 216 - DNA, 624 bp, Homo sapiens
  CACNA1E
tgcacatcatgggctctgtctgtgagagaaaaatcccggtgcttggtgtccttgcatgacatggagttttgcatgtagatcaatttaaaatgtacctcttgtttacataatttgcataattttaaaagataatgttgccaaactttggaaatgttaatgttcagactgaaaatctccactacatgtaactttcttcctctggatcagtggcatggcttataatcccagccagtggtttgaactgttccagtgtcaactgccatgtgctctgcttcaagggggaactagccttttgtgaattttttgtacataagtatttgttacaaatattttagcaaatgctttctatttctcttgcttgtgcatatcttggctggcgttacagaaaaatagtgtaaacattatttccttaccggggaatgagggttttttctttttcttttttttttttttttttttttttagtttgtgtgtgggggtgggtaagggaggggatggtttatgttgaatgtttagtttttcttctgcatgatacgtcatgttgtgggatctttagaaaacttcatactgtatgaataagaaaataaaatatttgaaacttgaaaaaaaaaaaaaaaaaaaaaa

SEQ ID NO: 217 - DNA, 560 bp, Homo sapiens
  WNK1
  modified_base (508)..(508): a, c, t or g
  modified_base (523)..(523): a, c, t or g
tcttgctcctcccgtaccaactgccgctgctctcgtttcctcttaattaatgatactctgtctttgatagctttagccatggtcttgtgatcaccttcacagacatacccagactctaccatttcttgtgcaacatcttctgggacatctctctctaaatcaaaagaaaactcaatagcttcattatctttgtattttccctttaatttcttaatatcttcaatacgtagccataattttatggctattttttctccatcatcctcttctgctaattctacccgtactcctgtttcctcttggaagaaggcatggttcaaaaggtctttgatggaatatctttcatctttgttttgtcgtatgcatccttcaataatttccttcacttcaggaattgctactttgtcaaaactggctggcttcaccccctcatttatacaatccttttgagggcagcagcagcaatgagaatttatgatgacaaatactgagcaaaaatctttctttntaatatccatcaganaaggcaaaacagatttcttattggaggaaaatgaagg

SEQ ID NO: 218 - DNA, 1410 bp, Homo sapiens
  SCOTIN
ggtcttacccagcgctggccggcggacctgaccacggctcctccccctgccacacctccctggccgtggtggggattgccctggggctctggcggacgtgactggtcccttcacccgctccttgtcggggtgtgctggggcgacccttgctggaggtactggcctcagccctttctcccgcttccccacccctcttacccccagattacattctctgtgtggtgtctttactgcagatgaaggatttgggggcagagcacttggcaggtcatgaaggggtccaacttctcgggttgttgaacgtctacctggaacaagaagagagattccaacctcgagaaaaagggctgagtttgattgaggctaccccggagaatgataacactttgtgtccaggattgagaaatgccaaagttgaagatttaaggagtttagccaacttttttggatcttgcactgaaacttttgtcctggctgtcaatattttggacaggttcttggctcttatgaaggtgaaacctaaacatttgtcttgcattggagtctgttcttttttgctggctgctagaatagttgaagaagactgcaatattccatccactcatgatgtgatccggattagtcagtgtaaatgtactgcttctgacataaaacggatggaaaaaataatttcagaaaaattgcactatgaattggaagctactactgccttaaactttttgcacttataccatactattatactttgtcatacttcagaaaggaaagaaatactgagccttgataaactagaagctcagctgaaagcttgcaactgccgactcatcttttcaaaagcaaaaccatctgtattagccttgtgccttctcaatttggaagtggaaactttgaaatctgttgaattactggaaattctcttgctagttaaaaaacattccaagattaatgacactgagttcttctactggagagagttggtttctaaatgcctagccgagtattcttctcctgaatgttgcaaaccagatcttaagaagttggtttggatcgtttcaaggcgcacagcccagaacctccacaacagctactatagtgttcctgagctgccaacgatacctgaggggggttgttttgatgaaagtgaaagtgaggactcttgtgaagatatgagttgtggagaggagagtctcagcagctctcctcccagtgatcaagagtgcaccttctttttcaacttcaaagtggcacaaacactgtgctttccatcttagaaatctgattgttctgtcagaatttatatttacaggtttcaaagcaataaatgggggaataggtagtttcctggtttagcccccatctagtcaggaattaatatactggaatacctaccttctatttgttattcagatc

SEQ ID NO: 219 - DNA, 465 bp, Homo sapiens
  GNAS
tttttttttgctgaaacatgcagagaatttttatttatcacgaatgttaatacttatattgacttgcagaacagagtgagagagacgtgcaggccaaggtattagtagggttcaagggtttagcaggacatctagtacacagtaggttgctcactaaggacttgtcatatcttgctcaaatgccaacttttggtacagcagattgtcaattagtcatttcttatagagatgcctttttggatagttgtcatactacatttctgccaattaaggatttcagtccatttttcgttttttcaatcatcgtttaaggtcaggtagcaggggccccatcccccctcccccctcagataacagaatagtattcttattagaagttcctaagaccgagcaattccagcatgcaaattgtgataggacatagccgggaagatgagaaactgtagccatcatctagggatatta

SEQ ID NO: 220 - DNA, 3324 bp, Homo sapiens
  CHO1; KNSL5; MKLP1; MKLP-1
gcagagcaccgcgccttagccgcgaagttctagttcttgctgccggtcctaacgtcccgcagtcttcgccagccagccgtcccgcatgcgcgtttgggcggcgtggagcctgctgccatgaagtcagcgagagctaagacaccccggaaacctaccgtgaaaaaagggtcccaaacgaaccttaaagacccagttggggtatactgtagggtgcgcccactgggctttcctgatcaagagtgttgcatagaagtgatcaataatacaactgttcagcttcatactcctgagggctacagactcaaccgaaatggagactataaggagactcagtattcatttaaacaagtatttggcactcacaccacccagaaggaactctttgatgttgtggctaatcccttggtcaatgacctcattcatggcaaaaatggtcttctttttacatatggtgtgacgggaagtggaaaaactcacacaatgactggttctccaggggaaggagggctgcttcctcgttgtttggacatgatctttaacagtatagggtcatttcaagctaaacgatatgttttcaaatctaatgataggaatagtatggatatacagtgtgaggttgatgccttattagaacgtcagaaaagagaagctatgcccaatccaaagacttcttctagcaaacgacaagtagatccagagtttgcagatatgataactgtacaagaattctgcaaagcagaagaggttgatgaagatagtgtctatggtgtatttgtctcttatattgaaatatataataattacatatatgatctattggaagaggtgccgtttgatcccataaaacccaaacctccacaatctaaattgcttcgtgaagataagaaccataacatgtatgttgcaggatgtacagaagttgaagtgaaatctactgaggaggcttttgaagttttctggagaggccagaaaaagagacgtattgctaatacccatttgaatcgtgagtccagccgttcccatagcgtgttcaacattaaattagttcaggctcccttggatgcagatggagacaatgtcttacaggaaaaagaacaaatcactataagtcagttgtccttggtagatcttgctggaagtgaaagaactaaccggaccagagcagaagggaacagattacgtgaagctggtaatattaatcagtcactaatgacgctaagaacatgtatggatgtcctaagagagaaccaaatgtatggaactaacaagatggttccatatcgagattcaaagttaacccatctgttcaagaactactttgatggggaaggaaaagtgcggatgatcgtgtgtgtgaaccccaaggctgaagattatgaagaaaacttgcaagtcatgagatttgcggaagtgactcaagaagttgaagtagcaagacctgtagacaaggcaatatgtggtttaacgcctgggaggagatacagaaaccagcctcgaggtccagttggaaatgaaccattggttactgacgtggttttgcagagttttccacctttgccgtcatgcgaaattttggatatcaacgatgagcagacacttccaaggctgattgaagccttagagaaacgacataacttacgacaaatgatgattgatgagtttaacaaacaatctaatgcttttaaagctttgttacaagaatttgacaatgctgttttaagtaaagaaaaccacatgcaagggaaactaaatgaaaaggagaagatgatctcaggacagaaattggaaatagaacgactggaaaagaaaaacaaaactttagaatataagattgagattttagagaaaacaactactatctatgaggaagataaacgcaatttgcaacaggaacttgaaactcagaaccagaaacttcagcgacagttttctgacaaacgcagattagaagccaggttgcaaggcatggtgacagaaacgacaatgaagtgggagaaagaatgtgagcgtagagtggcagccaaacagctggagatgcagaataaactctgggttaaagatgaaaagctgaaacaactgaaggctattgttactgaacctaaaactgagaagccagagagaccctctcgggagcgagatcgagaaaaagttactcaaagatctgtttctccatcacctgtgcctttactctttcaacctgatcagaacgcaccaccaattcgtctccgacacagacgatcacgctctgcaggagacagatgggtagatcataagcccgcctctaacatgcaaactgaaacagtcatgcagccacatgtccctcatgccatcacagtatctgttgcaaatgaaaaggcactagctaagtgtgagaagtacatgctgacccaccaggaactagcctccgatggggagattgaaactaaactaattaagggtgatatttataaaacaaggggtggtggacaatctgttcagtttactgatattgagactttaaagcaagaatcaccaaatggtagtcgaaaacgaagatcttccacagtagcacctgcccaaccagatggtgcagagtctgaatggaccgatgtagaaacaaggtgttctgtggctgtggagatgagagcaggatcccagctgggacctggatatcagcatcacgcacaacccaagcgcaaaaagccatgaactgacagtcccagtactgaaagaacattttcatttgtgtggatgatttctcgaaagccatgccagaagcagtcttccaggtcatcttgtagaactccagctttgttgaaaatcacggacctcagctacatcatacactgacccagagcaaagctttccctatggttccaaagacaactagtattcaacaaaccttgtatagtatatgttttgccatatttaatattaatagcagaggaagactccttttttcatcactgtatgaattttttataatgtttttttaaaatatatttcatgtatacttataaactaattcacacaagtgtttgtcttagatgattaaggaagactatatctagatcatgtctgattttttattgtgacttctccagccctggtctgaatttcttaaggttttataaacaaatgctgctatttattagctgcaagaatgcactttagaactatttgacaattcagactttcaaaataaagatgtaaatgactggccaataataaccattttaggaaggtgttttgaattctgtatgtatatattcactttctgacatttagatatgccaaaagaattaaaatcaaaagcactaagaaataaaaaaaaaaaaaaaaaaa

SEQ ID NO: 221 - DNA, 2512 bp, Homo sapiens
  HSP70-2
gcctgaggagctgctgcgagggtccgcttcgtctttcgagagtgactcccgcggtcccaaggctttccagagcgaacctgtgcggctgcaggcaccggcgtgttgagtttccggcgttccgaaggactgagctcttgtcgcggatcccgtccgccgtttccagcccccagtctcagagcggagcccacagagcagggcaccggcatggccaaagccgcggcgatcggcatcgacctgggcaccacctactcctgcgtgggggtgttccaacacggcaaggtggagatcatcgccaacgaccagggcaaccgcaccacccccagctacgtggccttcacggacaccgagcggctcatcggggatgcggccaagaaccaggtggcgctgaacccgcagaacaccgtgtttgacgcgaagcggctgatcggccgcaagttcggcgacccggtggtgcagtcggacatgaagcactggcctttccaggtgatcaacgacggagacaagcccaaggtgcaggtgagctacaagggggagaccaaggcattctaccccgaggagatctcgtccatggtgctgaccaagatgaaggagatcgccgaggcgtacctgggctacccggtgaccaacgcggtgatcaccgtgccggcctacttcaacgactcgcagcgccaggccaccaaggatgcgggtgtgatcgcggggctcaacgtgctgcggatcatcaacgagcccacggccgccgccatcgcctacggcctggacagaacgggcaagggggagcgcaacgtgctcatctttgacctgggcgggggcaccttcgacgtgtccatcctgacgatcgacgacggcatcttcgaggtgaaggccacggccggggacacccacctgggtggggaggactttgacaacaggctggtgaaccacttcgtggaggagttcaagagaaaacacaagaaggacatcagccagaacaagcgagccgtgaggcggctgcgcaccgcctgcgagagggccaagaggaccctgtcgtccagcacccaggccagcctggagatcgactccctgtttgagggcatcgacttctacacgtccatcaccagggcgaggttcgaggagctgtgctccgacctgttccgaagcaccctggagcccgtggagaaggctctgcgcgacgccaagctggacaaggcccagattcacgacctggtcctggtcgggggctccacccgcatccccaaggtgcagaagctgctgcaggacttcttcaacgggcgcgacctgaacaagagcatcaaccccgacgaggctgtggcctacggggcggcggtgcaggcggccatcctgatgggggacaagtccgagaacgtgcaggacctgctgctgctggacgtggctcccctgtcgctggggctggagacggccggaggcgtgatgactgccctgatcaagcgcaactccaccatccccaccaagcagacgcagatcttcaccacctactccgacaaccaacccggggtgctgatccaggtgtacgagggcgagagggccatgacgaaagacaacaatctgttggggcgcttcgagctgagcggcatccctccggcccccaggggcgtgccccagatcgaggtgaccttcgacatcgatgccaacggcatcctgaacgtcacggccacggacaagagcaccggcaaggccagcaagatcaccatcaccaacgacaagggccgcctgagcaaggaggagatcgagcgcatggtgcaggaggcggagaagtacaaagcggaggacgaggtgcagcgcgagagggtgtcagccaagaacgccctggagtcctacgccttcaacatgaagagcgccgtggaggatgaggggctcaagggcaagatcagcgaggcggacaagaagaaggttctggacaagtgtcaagaggtcatctcgtggctggacgccaacaccttggccgagaaggacgagtttgagcacaagaggaaggagctggagcaggtgtgtaaccccatcatcagcggactgtaccagggtgccggtggtcccgggcctgggggcttcggggctcagggtcccaagggagggtctgggtcaggccctaccattgaggaggtggattaggggcctttgttctttagtatgtttgtctttgaggtggactgttgggactcaaggactttgctgctgttttcctatgtcatttctgcttcagctctttgctgcttcacttctttgtaaagttaagttgtaacctgatggtaattagctggcttcattatttttgtagtacaaccgatatgttcattagaattctttgcatttaatgttgatactgtaagggtgtttcgttccctttaaatgaatcaacactgccaccttctgtacgagtttgtttttttttttttttttttttttttttgcttggcgaaaacactacaaaggctgggaatgtatgtttttataatttgtttatttaaatatgaaaaataaaatgttaaacttt

SEQ ID NO: 222 - DNA, 2489 bp, Homo sapiens
  UBF; NOR-90
ctccgccgcgggagggagctgcggctgtgccggccgagcgggggagggcgccgccactcagagccagggagggagccgctggagcggaagcccggaggccgcgctgcgccggggtgaggtggctttgaccccgggttgcccggccagcacgaccgaggaggtggctggacagctggaggatgaacggagaagccgactgccccacagacctggaaatggccgcccccaaaggccaagaccgttggtcccaggaagacatgctgactttgctggaatgcatgaagaacaaccttccatccaatgacagctccaagttcaaaaccaccgaatcacacatggactgggaaaaagtagcatttaaagacttttctggagacatgtgcaagctcaaatgggtggagatttctaatgaggtgaggaagttccgtacattgacagaattgatcctcgatgctcaggaacatgttaaaaatccttacaaaggcaaaaaactcaagaaacacccagacttcccaaagaagcccctgaccccttatttccgcttcttcatggagaagcgggccaagtatgcgaaactccaccctgagatgagcaacctggacctaaccaagattctgtccaagaaatacaaggagcttccggagaagaagaagatgaaatatattcaggacttccagagagagaaacaggagttcgagcgaaacctggcccgattcagggaggatcaccccgacctaatccagaatgccaagaaatcggacatcccagagaagcccaaaaccccccagcagctgtggtacacccacgagaagaaggtgtatctcaaagtgcggccagatgagatcatgagagactatatccagaagcacccagagctgaacatcagtgaggagggtatcaccaagtccaccctcaccaaggccgaacgccagctcaaggacaagtttgacgggcgacccaccaagccacctccgaacagctactcgctgtactgcgcagagctcatggccaacatgaaggacgtgcccagcacagagcgcatggtgctgtgcagccagcagtggaagctgctgtcccagaaggagaaggacgcctatcacaagaagtgtgatcagaaaaagaaagattacgaggtggagctgctccgtttcctcgagagcctgcctgaggaggagcagcagcgggtcttgggggaagagaagatgctgaacatcaacaagaagcaggccaccagccccgcctccaagaagccagcccaggaagggggcaagggcggctccgagaagcccaagcggcccgtgtcggccatgttcatcttctcggaggagaaacggcggcagctgcaggaggagcggcctgagctctccgagagcgagctgacccgcctgctggcccgaatgtggaacgacctgtctgagaagaagaaggccaagtacaaggcccgagaggcggcgctcaaggctcagtcggagaggaagcccggcggggagcgcgaggaacggggcaagctgcccgagtcccccaaaagagctgaggagatctggcaacagagcgttatcggcgactacctggcccgcttcaagaatgaccgggtgaaggccttgaaagccatggaaatgacctggaataacatggaaaagaaggagaaactgatgtggattaagaaggcagccgaagaccaaaagcgatatgagagagagctgagtgagatgcgggcacctccagctgctacaaattcttccaagaagatgaaattccagggagaacccaagaagcctcccatgaacggttaccagaagttctcccaggagctgctgtccaatggggagctgaaccacctgccgctgaaggagcgcatggtggagatcggcagtcgctggcagcgcatctcccagagccagaaggagcactacaaaaagctggccgaggagcagcaaaagcagtacaaggtgcacctggacctctgggttaagagcctgtctccccaggaccgtgcagcatataaagagtacatctccaataaacgtaagagcatgaccaagctgcgaggcccaaaccccaaatccagccggactactctgcagtccaagtcggagtccgaggaggatgatgaagaggatgaggatgacgaggacgaggatgaagaagaggaagatgatgagaatggggactcctctgaagatggcggcgactcctctgagtccagcagcgaggacgagagcgaggatggggatgagaatgaagaggatgacgaggacgaagacgacgacgaggatgacgatgaggatgaagataatgagtccgagggcagcagctccagctcctcctcctcaggggactcctcagactctgactccaactgaggctcagccccaccccagggcagccagggagagcccaggagctcccctccccaactgaccacctttgtttctcccccatgttctgtcccttgcccccctggcctcccccactttctttctttcttt

SEQ ID NO: 223 - DNA, 1950 bp, Homo sapiens
ccgctttttttttttttttttttttgagacggagtctcactctgtcgcacaggctggagtgcagtggcgcaatctcggctcactgcaacctccgcctcctgggttcaagcgattcttctgccccagcctcccaagtagctgggactacaggcacctgccaccatgtccggctaactttttttggtatttttagtagagacggggtttcaccgttatctgccaggctggtctcaaactcctgacctcatgatccccccacctcggcctcccggtccacttttgttttagcttgagggcgtacgtgtgcggctttgttacaagggtatgctgcgtggtgctaaagtttgggcttctatgaatcctgtcacccagacagtgaaccacaggaagtaatatgcccagatagtatccaatagaaagcatttcagcccttcctccccttcctccctccctccctccttctggagcccccagtgtctactattcccatcttttttatttgagacagtgtctcgctctgttgcccaggctggaatgcagtggcacgatcacggcttactgcagcctcaatcttctgggctcaagtgatcctccctacttagcctcccaaaacactgagattgcagccatgagccactgcgcctggccaggtttgatttctgtagtagctgttcaattgtgggtcaagggtcaggttctggggtaaggaggtattgggcttctcacatttaaggtcagaagtccagtcctgggtcaggggttgggatcagagatcaaggctgagctctgagtttggaggtcagggattggactctcagtgattgaaatccttaggtcagaggtacagtcactgaggataggagtcaggagtggagttcgggacagtcaaagtcgaggttaagttttaggtcatcacctccttccgctggggcacgcggcgccaccagacgtggtcgcaggaggagcaggcaaactgccggtccacagcagggataaggtcgtcctgggcacgttgaaacatgcgtaggttggcttctgtcagtggcaggagggaggtcgccactgcctgtggaatggggcaggtggggatgaggtgggggggtgtcaccccttctgcaccaacataagcatcagccctcctctccctacagacgagtcctcttcctgccccagtgaatatctcccctcctgccctaatggacatccttctgtgcctgcagatgtccccctcccaactcccccatcccaagccctagccaccaactcacctgaatgtcccggtcctgcttcatatcttctggtggatcctgggtggagatagcaggggcagaaactggggatggggctcaggcctctttccacccgtttgctgggggaggcccccggccgcaatgagtagggtgcccctaactcgccagaagctcacagagcaccactcacttattgagagccaggtgtgtggcctcagttgtcctcatagcagccctgagaggtgggcacacctgttaccttattgctcagatggggaaactgaggcttaggggagggcttgcctgagtgaggctagcctgacccccatactcacttcctgcctgcaaatgccacatgcttgttgatgttgtgacatatcgcccctttgaggccacgttgtgctcggctaagtgggagagagatgtgggttcaaatcccagctgtatcacttccagctgtggggacttgggcaagccactccctgccccctgggttcccactgacaggcatgttagagcccaggctctgactccaggtggccagggttcaaatcgcagctgcccctgcttgctggcaagtgacttcggcctcagtttctttgtctgtgaaatggggataaataataggacctgtctcctggggtcactgcagtgatgaaataaataaattcctggaatcttgaaaaaaaaaaaaaaaaaa

SEQ ID NO: 224 - DNA, 1340 bp, Homo sapiens
  GBF; ZF9; BCD1; CPBP; PAC1; ST12; COPEB; DKFZp686N0199
ccgagcctggagtttgcatgaaactttcacctgcgctccggggagactttcggctccggctcccaccgcgcgcctcgccgccctcgcgaccgcgggctccgtccaacccggcccgacatggacgtgctccccatgtgcagcatcttccaggagctccagatcgtgcacgagaccggctacttctcggcgctgccgtctctggaggagtactggcaacagacctgcctagagctggaacgttacctccagagcgagccctgctatgtttcagcctcagaaatcaaatttgacagccaggaagatctgtggaccaaaatcattctggctcgggagaaaaaggaggaatccgaactgaagatatcttccagtcctccagaggacactctcatcagcccgagcttttgttacaacttagagaccaacagcctgaactcagatgtcagcagcgaatcctctgacagctccgaggaactttctcccacggccaagtttacctccgaccccattggcgaagttttggtcagctcgggaaaattgagctcctctgtcacctccacgcctccatcttctccggaactgagcagggaaccttctcaactgtggggttgcgtgcccggggagctgccctcgccagggaaggtgcgcagcgggacttcggggaagccaggtgacaagggaaatggcgatgcctcccccgacggcaggaggagggtgcaccggtgccactttaacggctgcaggaaagtttacaccaaaagctcccacttgaaagcacaccagcggacgcacacaggagaaaagccttacagatgctcatgggaagggtgtgagtggcgttttgcaagaagtgatgagttaaccaggcacttccgaaagcacaccggggccaagccttttaaatgctcccactgtgacaggtgtttttccaggtctgaccacctggccctgcacatgaagaggcacctctgagggagcagagaggtggatcctgtaggctaaaaggcttccaggctgagagccggccgtggaaggagggatgcgtggttccagccaaagcatgccgttgtgcaccctacccagttgcctccagggcctctccttggaaggtcttttgagggctaaaaaggtcctgtaagaagcggcatagcacccgtggtggcaatggttatgtgggtgaccctggactcgccactggtacccgcccttccgagcggcggcctaagcctttgccgtgagatgcacactgagaatgctaatggttgggttgattgtatgttgaggatctattactgaccgtatgatgaggccaactttttttccttgtggttagcaagactgca

SEQ ID NO: 225 - DNA, 1935 bp, Homo sapiens
  MT1; MGC32732
tctagacagtggcgcaagagactggggttgcactgggactccaggaaaggcttagctgttgacgaaggaccggggcggggccggggggcggggcgaaggccaggatctccaggtacccggaaccccaaggggcgggtgtagcaggcaatcttggcgaaactgggaagggcgggcaggagggcagggaagccgctcacccaggcacaaagcgcctcccgcttgagcggactccaaagggacggtccgcggtgtgcagcgagctgcgctcaggggaccttgcgcccggcccttctgctgcacacagcccacccaggacctcccgcagcgctgacaggcggggcgggtgcaaagacggggcggggtctctgcgcccggccccctcccctgactatcaaagcagcggccggctgtttgggtccaccacgccttccacctgccccactgcttcttcgcttctctcttggaaagtccagtctctcctcggcttgcaatggaccccaactgctcctgcgccgctggtaaggaacgccgggttccgtgcctggggatgctcgattcccagacaccatagagagtgttcctgggtttgagaaggtcgtattttgagatctcaactgtaggggactccttgacttagtccagtgctttcctcttggccaagatcctgagagcatttccttcctctctgtgcctctgtgtcagcgttgagggtactgaggctcaaggctgtcctgctccacgtcatgcggtttgtcccagggctgttggctgagccccagtgctctgaccaggctttgagcagcaggattagataggaggcaggggacattgcctcttcggggttcaggacagaaagtcgaagtcgccgtcttcccaggctgtgcctggagcctgggactttcctttggagtgcaaacaggaggctgcttggccttcccagcatgaagggagaggacatggggcttctcttcctctgctctgagtgggaaaggagctctgagggctggccccgcacagaggagggggcaatggagactcattaactcactgctgtacctcctgcaggtcactcgccgctcactggcttttttttctctttctcgcaggtgtctcctgcacctgcgctggttcctgcaagtgcaaagagtgcaaatgcacctcctgcaagaagagtgagtgtgaggccatctccatggtctggggctgtggctaaggttgggatggaacccaaggctggccctgagtgcatgcttctggggaactggccttcctttgtccccgtaggttgtcactgcctttctagtcttctgccctgtgcagggcgcctgggcagctttctcataggaagacccaccccagatatttcccagttgtctcctgacaaagccataccctcctgaactgagggtcctttgtggctggaggctctgttgggggcctctgttggggagggaggtccctgggcaagttggctgtgacctctcatgctcctcttcttccccaggctgctgctcctgctgccccgtgggctgtagcaagtgtgcccagggctgtgtttgcaaaggggcgtcagagaagtgcagctgctgcgactgatgccaggacaacctttctcccagatgtaaacagagagacatgtacaaacctggattttttttttataccaccttgacccatttgctacattccttttcctgtgaaatatgtgagtgataattaaacactttagacctgattctgacttcagtttcccttatgtgcttcagaaatcagagactggggtgggggatcgaactagggttgcagactcctgggctctaaatggaaatctgagtccctaacaatcagagtgcattaaggcaagccaggctgcctcactgtgcttcctcttctgtagaatggaataacacttcatcaggtcattggtggggatcc

SEQ ID NO: 226 - DNA, 3111 bp, Homo sapiens
  CNB; CNB1; CALNB1
gcgggtcagcgcgagccgctgcagtgagtccgtcacggctccggcgcgagcgcgaggctgcagcccccgagtttcccggccgtcttcgccccctctccccctcctttcttcttctctgcctctcctgcctctcgccgctgctcctcccgcgctctccggctctgaatctcgaccttaatttatttccccctaccctgcccgctccctcgcgtgcccaatcgcccggccggcgcgggccccgcggcgccgcctcccctcccccacgcgcgccccctccccgccggcgacccgagggccgcagctgggccgccgccgccgtttcctgcgagccagcctgagcgcaacacttctccgagccagcgagccagcgagccgccgacccgccgagcaaaatgggaaatgaggcaagttatcctttggaaatgtgctcacactttgatgcggatgaaattaaaaggctaggaaagagatttaagaagcttgatttggacaattctggttctttgagtgtggaagagttcatgtctctgcctgagttacaacagaatcctttagtacagcgagtaatagatatattcgacacagatgggaatggagaagtagactttaaagaattcattgagggcgtctctcagttcagtgtcaaaggagataaggagcagaaattgaggtttgctttccgtatctatgacatggataaagatggctatatttccaatggggaactcttccaggtattgaagatgatggtggggaacaatctgaaagatacacagttacagcaaattgtagacaaaaccataataaatgcagataaggatggagatggaagaatatcctttgaagaattctgtgctgttgtaggtggcctagatatccacaaaaagatggtggtagatgtgtgactcttatcagagagtaccacccaacacttttgctttcttctccatctctgaagatctgctcaagacgtccagcaatgctctctgtgtatttaaatggaagtatttttctctgtgaagccacattttccaacatgagcctcatgaagccaactaagtgttattgaactgtaattctctcaataactcagtgtagcactttaaagtctgaaggacagcaacatgaaaagagcatatcaatgtggtggagaaagggaaggggttggctttttaatttatttttcttcatcttttataacaagaaagtatctatatatacatatgtaaatatttatatatagatatatgtagctttctatatatgtagtaggttggctttaatttaatatacttgattcagaaacaaaacaatagagtacaaaagtgccaagcagaacataaaacatccttacttttatttcacacagttttatatatagatagaagactgtacaatttgagccgggtgttaggccagctattttccttttcctgtgctttctcctttgagagattgacaaagcatttgttaacgtcctattatttaccttaattacatttttgtaacaaaggagtctgtaactttatttatacttatgaatatatccagggactacttctcattgctgagcagcttttaatacacctctgcttgaggagaaagtctagttcattgctactgccaagagctagttcttgtgttcatatagtaactgcacagggcttatagctgcttcattctgctactttgtaactaggagccattgcatttattaaatgtccctcagtaacgttaagtgctagttgtgattttatacataaaggccagaagctgtctgaggcaatcatgattgattgtatgtatcacttactgaagaatacctgaagtgatcatgtaactacttataagggatatccatttgtttgattacatgggtaaataatttgtcattaaacttgtgtttgaatcatgaattcccttgtttcaaaagacttgcagctaatctaaaaaactggtgatatttaatatgcatgtatgtatctaaacacccacatatatttgtggtttaagtgtgagaaatcttgctaatctatatgccacagaagagcaaaattgtatccaaatttatgccacttaaatttctttaccacgagggatagagcatgcatactggtttttttttcttgatttgcccatataattggtaatggataacttaataaatttgtgtgatataaaagtagtgtatcatgttctactgtttgatcttatcccttcccatttctgcaaaggtactgttagctggaagaaaaacattttggttagctttgtatgacagtagtctttccctttatagtttctctataaaaactggttttaaaatcagtggaaaagggcaggttgaatcaaggtgaatcaatctgaaattgagcacacctgcctgccatcgctgttccttcaactgagtgctgcacatcatgggctctgtctgtgagagaaaaatcccggtgcttggtgtccttgcatgacatggagttttgcatgtagatcaatttaaaatgtacctcttgtttacataatttgcataattttaaaagataatgttgccaaactttggaaatgttaatgttcagactgaaaatctccactacatgtaactttcttcctctggatcagtggcatggcttataatcccagccagtggtttgaactgttccagtgtcaactgccatgtgctctgcttcaagggggaactagccttttgtgaattttttgtacataagtatttgttacaaatattttagcaaatgctttctatttctcttgcttgtgcatatcttggctggcgttacagaaaaatagtgtaaacattatttccttaccggggaatgagggttttttctttttctttttttttttttttttttttagtttgtgtgtgggggtgggtaagggaggggatggtttatgttgaatgtttagtttttcttctgcatgatacgtcatgttgtgggatctttagaaaacttcatactgtatgaataagaaaataaaatatttgaaacttgaaaaaaaaaaaaaaaaaaaaaaaaaaaaaaaaaaaaaaaaaaaaaaaaaaaaaaaaaaaaaaaaaaaaaaaaaaaaaaaaaaaaaaaaaaaaaaaaaaaa

SEQ ID NO: 227 - DNA, 3044 bp, Homo sapiens
  ALDH5; ALDHX; MGC2230
ggcgggacctgcggccagccctgggcggccatgtggacagagctgggagggccggaaccagaacccaagcgtgatcctgaaccggagcccgagcctgctgcagagtgtcagcatgctgcgcttcctggcaccccggctgcttagcctccagggcaggaccgcccgctactcctcggcagcagccctcccaagccccattctgaacccagacatcccctacaaccagctgttcatcaacaatgaatggcaagatgcagtcagcaagaagaccttcccgacggtcaaccctaccaccggggaggtcattgggcacgtggctgaaggtgaccgggctgatgtggatcgggccgtgaaagcagcccgggaagccttccgcctggggtccccatggcgccggatggatgcctctgagcggggccggctgctgaaccgcctggcagacctagtggagcgggatcgagtctacttggcctcactcgagaccttggacaatgggaagcctttccaagagtcttacgccttggacttggatgaggtcatcaaggtgtatcggtactttgctggctgggctgacaagtggcatggcaagaccatccccatggatggccagcatttctgcttcacccggcatgagcccgttggtgtctgtggccagatcatcccgtggaacttccccttggtcatgcagggttggaaacttgccccggcactcgccacaggcaacactgtggttatgaaggtggcagagcagacccccctctctgccctgtatttggcctccctcatcaaggaggcaggctttccccctggggtggtgaacatcatcacggggtatggcccaacagcaggtgcggccatcgcccagcacgtggatgttgacaaagttgccttcaccggttccaccgaggtgggccacctgatccagaaagcagctggcgattccaacctcaagagagtcaccctggagctgggtggtaagagccccagcatcgtgctggccgatgctgacatggagcatgccgtggagcagtgccacgaagccctgttcttcaacatgggccagtgctgctgtgctggctcccggaccttcgtggaagaatccatctacaatgagtttctcgagagaaccgtggagaaagcaaagcagaggaaagtggggaacccctttgagctggacacccagcaggggcctcaggtggacaaggagcagtttgaacgagtcctaggctacatccagcttggccagaaggagggcgcaaaactcctctgtggcggagagcgtttcggggagcgtggtttcttcatcaagcctactgtctttggtggcgtgcaggatgacatgagaattgccaaagaggagatctttgggcctgtgcagcccctgttcaagttcaagaagattgaggaggtggttgagagggccaacaacaccaggtatggcctggctgcggctgtgttcacccgggatctggacaaggccatgtacttcacccaggcactccaggccgggaccgtgtgggtaaacacctacaacatcgtcacctgccacacgccatttggagggtttaaggaatctggaaacgggagggagctgggtgaggatgggcttaaggcctacacagaggtaaagacggtcaccatcaaggttcctcagaagaactcgtaagagcagctgtcagggaggcccagtcacagtccagcaattccacaaccaccttgacgaatgcttgccaagctgttttaaagccaagaacaccctttctttgttccaaattaactcttagaagaaaccccacaaataaagcaattcaatcaaggctgttctatttaaatcagagatggggaccaggctcagagttctacctatctaacccccaaccacagcccccttggtggcccatgagttgcttccatgaaatcttaggagtctctggaggacagattaaaaaccagtgatctgtaatttgtagctcttcctgctgatccaaggactttcccatgggtgcgcttgatggtttagtggatcgactcaactcagaacacaagcttggaaagtgttaggggttttgaactaggtggatactaaatctcggccccactcttcattggcttaacctaaaaaccagaggtgcttttccttgtctgtgtgccagttgctggctgttttagttgcttgcccttcattttgctactgattttccttaatttgtgggaaggagtaggcaaagaatatgcttacatgattacacctgtaaagtaagcccaaacatcccaaatgtccgtcaactgatgagtggattaataaaatgtttccatggaatattccttggattactcagccataaaaaggaatgaagtactgacacatgctgtgacatcagtgaaccctgaaaacatccttctcagtgaaacaagccagagagatgtacaaggctacagactgtatgattccatttatatgaaatatacatactaggcaaatccatggagatggaacatagattagtggttgccaggggatagaggagtaattgttagtgggcatgggatttgtttttgggaggttttgaaaatgttctggagttgaacaatagtaatggttgcatgatttggtaaaaatactaaaaactatggaattgtttaattatggtatatgaattaatttctttctttttttcttttttttttttttttttgacacggagtctcactctgtcgcccaggctggagtgcagtggtgtgatctcgtctcactgcaacctccgcctcccagattcaagcgattctcctgtctcagcctcctgagtagctgggattataggtacatgccatcacacctggctaatttttgtatttttagtagagatgaggtttcaccattttggccaggctgatcttgaactcctgacctcaggtgatccacccgcctcagcctcccaaagtgctgggattacaggtgggagccacaacacccggccatgaattaactccgttaaaaaataaacgtatacattctgtgagcaaaaaaaaaaaaaaaaaaaaaa

SEQ ID NO: 228 - DNA, 1195 bp, Homo sapiens
  VPF; VEGFA; MGC70609
gcgcagacagtgctccagcgcgcgcgctccccagccctgcccggcctcgggccgggaggaagagtagctcgccgaggcgccgaggagagcgggccgccccacagcccgagccggagagggacgcgagccgcgcgccccggtcgggcctccgaaaccatgaactttctgctgtcttgggtgcattggagccttgccttgctgctctacctccaccatgccaagtggtcccaggctgcacccatggcagaaggaggagggcagaatcatcacgaagtggtgaagttcatggatgtctatcagcgcagctactgccatccaatcgagaccctggtggacatcttccaggagtaccctgatgagatcgagtacatcttcaagccatcctgtgtgcccctgatgcgatgcgggggctgctgcaatgacgagggcctggagtgtgtgcccactgaggagtccaacatcaccatgcagattatgcggatcaaacctcaccaaggccagcacataggagagatgagcttcctacagcacaacaaatgtgaatgcagaccaaagaaagatagagcaagacaagaaaaaaaatcagttcgaggaaagggaaaggggcaaaaacgaaagcgcaagaaatcccggtataagtcctggagcgttccctgtgggccttgctcagagcggagaaagcatttgtttgtacaagatccgcagacgtgtaaatgttcctgcaaaaacacagactcgcgttgcaaggcgaggcagcttgagttaaacgaacgtacttgcagatgtgacaagccgaggcggtgagccgggcaggaggaaggagcctccctcagggtttcgggaaccagatctctcaccaggaaagactgatacagaacgatcgatacagaaaccacgctgccgccaccacaccatcaccatcgacagaacagtccttaatccagaaacctgaaatgaaggaagaggagactctgcgcagagcactttgggtccggagggcgagactccggcggaagcattcccgggcgggtgacccagcacggtccctcttggaattggattcgccattttatttttcttgctgctaaatcaccgagcccggaagattagagagttttatttctgggattcctgtagacacacccacccacatacatacatttatatatatatatattatatatatataaattaa

SEQ ID NO: 229 - DNA, 855 bp, Homo sapiens
  MT1F
atcaaagcagcggcggctgttggggtccaccacgccttccacctgccccactgcttcttcgcttctctcttggaaagtccagtctctcctcggcttgcaatggaccccaatgctcctgcgccgctggtgtctcctgcacctgcgctggttcctgcaaggtgcaaagagtgcaaatgcacctcctgcaaggaagagctgctgctcctgctgccccgtgggctgtagcaagtgtgcccagggctgtgtttgcaaaggggcgtcagagaagtgcagctgctgcgactgatgccaggacaacctttctcccagatgtaaacagagagacatgtacaaaacctggattttttttttataccaccttgacccattgtgctacattccttttccttgtgaaatatggtggagtgatacttaaacactttagacctgcaaaaaaaaacagagacaaaaaacacaaaaactttgtggggcggctgcgccccggaaaaagtttttaaacccatctggtttggggggcggggccccaagtggatatggcaccttggggccaagggggcgcaaaggaaaaccgggctcaaagcactgtgcggcgggttttcccccccaaaaaaaaacgccgggggacaccgcgctcttcggacacacccaggggctgcggagggacaagaggttccccacacaggggggcccaagggatggttaaatagcgcagggaggggagggaataaacaaagacaaaccatatgacgcacaaccagactgaccacgaagaacacacacgaccaccgatgcaccacccacagcacaacgacacacaaagcccgcacacacacactgacgacacaacacacacgc

SEQ ID NO: 230 - DNA, 5035 bp, Homo sapiens
  CAM; CCM1
  modified_base (611)..(611): a, c, t or g
  modified_base (730)..(730): a, c, t or g
  modified_base (798)..(798): a, c, t or g
  modified_base (800)..(800): a, c, t or g
ctgcagtcctccaaaattctaaatgtkgcmtttacctgagtggacaaggtcacagagctagtcatcacttgaatccaggccttctaattccaaatctagaacaatttattttatacttaacaagttttcattttctaacatgtatttttagatgaaaacatgcagatgtaaaccttttatatggtagcataattcttcatttttctttttcagataatactaaatacacatataccccaggatgcccaattttttactgcttacaagatattatgcgagtctgtagtgaatccagtactcattttgctacacttacagcaaggatgttaatagccttggataagtaagaaatgccgttagaagtatcttttaattaatcaaatacatgtttatagtagaaattagttgtcatagatacagacactttgagaagaaaataatgaaaataatatatgtattaaaaaatggtaagtttttcaattctaatataaaaatgaaaaacccgaagataaggttgtcctggcctgggtacagcatgttaattttatttttcagaaatggtaaacactgccctggcttaagaattaagatttacctgttatgaaactctncatttaatattgagttactcttatcagtgaagaagtcattcaacctcttatgcctttgtctttctgtaagaacaaggctaatgtccctacatctcagtagtttgaattttaacagtacntttatgttttttgaaaggagtttttattactataatggcccatacatttaaaaaattatttgctgttncnttaacaamcttttattaataaatgaagtatttgtatactgrcttgatcyttatagatcatatgaacatattatcacatgtgcccctaaagtatgtacagtattatgcatgtttttttgttaaaaaaatcaatttgcaatataaataaattttaaaaataataaagtacttaactaacactaaattaaaattataaaaatctgaaggtaatattcacaagtgtcatatatcagagttagatagtaatctatctttttcatcttcactttcgaatggctacttctacctgtttttttattttgccargtggttagatgaacgtcatgcacaatctcactttattccagctttattccgaccttctcctcttgagcggataaaaactaatgtcataaatcctgcatatgctactgartcaggtcagacagaaaactcactacatatgggctatagtgcactagaaataaagagtaaaatgttagccctagagaaagcagatacctgtatttacaaccctttgtttggatcagatcttcagtatacaaatcgggtaagagtgaatgayttagctctgatttaaaagacgttttatctcaagtgtaattttttttcctgagatatatacatctattactaattataaacatgaaggcctggtacagtggctcacgcctgtaatcccagcactttgggaggccaaggagggcagattgcctgaggtcaggagttcgagaccagcctggccaacatggtgaaatctcgtctctactaaaaatacaaaaattagctggatgtggtggcgtacccctgtagtcttagctaccccggaggactgaggcaggagaatcgcttgaacctgggaggcggaggttgcagtgtgctgagatcgcagcactgaactccagcctgggcaacagagcaagactcattctcaataaataaataagtaaaaatttaaaatataaacatgtaaacattaagatgacaaagctcttaatgggtttttgttattgttttccctttctaggtagataaagtggtaataaatccatactttggtctaggagctccagactactcaaaaatccaaatacctaaacaggaaaaatggcagagaagcatgagcagtgtcacagaagacaagtactgtttcggttttactccacattgcttttataaaaacttacattctaatttaaagtattgtttaaaattatatatgcaatttgtatgcattgtagtcactattgagtttacagcttcttagtgatacagagctttcatagatgtgtcacatttcttttgaaacaatttttactgtcctgttgtggccctcaaaatcgaacgacagtgggtagatgattttcctctccaccgaagcgcctgtgaaggagattcagaattactaagccgtcttctcagtgaaagattttcagtcaaccagttagatagtgaccactgggcacccattcattatgcatgctggtaaatggaatatttattcttttctttttagaaagaatacattttttattataaatgttagtgcttcttttcaagactgttctcattccaaatactttttctctacctgtttgccttaggagttttctgttttgatcttagatgattgtatatgtgccaatgttcagaattgtaaggtctgccctatggggaacgtactgttagtgtccttaggcattgccaggtcatatagtaggatacttaatgactagtaaatgtcactgtagagtacaaggtcacttattcacccttgcagtttctcttgttttgcagtttctcttgttttgtattgggattatgttatgcttatctttactggaagtttgcatgtgttaactacttacgatttgaccttgcgtcttgctataaaagtatccttttagtgctttgagaaactggttatcaagaagccctcaaaagccttcattagaaccacagctttccattatgttagatactagtgttgggacaggattggggttagctctttccactagttgcccagtgtagctcttggtctcctctcacataattatttttcccctcagttgggctgagttgttagtgtttagagtagtagttaactgtttactataagtcatcttctagaaaggatataataaagttttttacattatttctgtgggaaagttgctyttcacmtatksyytaaagtaagcttccttggctaawttaagaggtaccggccaggtgcagtggctcacacctgtaatcccagcactttgggaggccgaggcaggtggatcacgaggtcaggagatcaagaccatcctggctaacatggtgaaaccccgtctccactaaaaatacaaaaattagccgggcgtggtggtgcacgcctgtaatcccagctacttgggaggctgaggcaggagaatagcttgaaccagggaggcagagattacagtgagctgagattgcaccaccgcactccagcctggtgacagagtgagattccatttcaaaaaaaaaaaaaaaaagtaccacattatttattgccttgttaaatgtccacagtgtcttagttgtattagattgagcaaggtaattcactttacctctctgcatctcagcttatttatccatatataaaatgcagtagatcatttctagagtttcttccaactcgaaattctttttgatttatctgatttttaatatttgtwatccaagcarttaactatagttgccttmamagtgtgtgtgtgtgtgtgttkwrtrwrwrwaaaaaaagatcttttttctgtttccttaaaaatatgctcttatatttcttattacatggaatttttgtattaagagttactctaattgtctttaactgagttaatagttgtttctttagattaccagaaaatactggcggcaaaaacaatactaaaagaaatcacatgcagccgggtgcagtggctcacacctgtaatcccagcactttgggaggccaaggtgggcggatcacgaggtcaggaggttgagaccatcctggctaacaccatgaaatcccgtctctattaaatatacaaaaaattagccgggtgtggtggcgggtgcctgtagtcccagctacttgggaggctgaggcaggagaatggtgtgaacccgcgaggcggagcttgcagtgagctgagatcacgccactgcactccagcctgggcaacacagtgagactccatctcaaaaaaaaggaaaaaaagaaatcacatgctttaccaggagctaaataaaaagaggtagagaatatagttcagattccaaaaaagtatactatagatttggaaaaggcaaaggcagtgaattttagttgaagaatcccaagtttatatttgactgtatagttgctcctttttgtggcacggggtgttttttttttttcccctctaatgaaagaatggtaatattttcaactattacataaaaacaaaagcatggcattgtatttaatatgctttggaatgtactatgtttcagtaccatttttagttcctaaaatatacctttggtaagttactttatgtctctaagggtctgtttctttatctatacgagatgggcttaaaaatggtaccttccctaatagtaaaagaaaaattaacaagtaacgtgctttgagagcacataatgagcactcaataaatcttggcttttaagaataagtgttggccgggtgtagtggcccacacctgtaatcccagcactttggaaggccaagaagggcagatgactggaagtcaggagtttgagaccagcctgccctggtgaaactctgtctctactgaaaatacaaaaattagctgggcgtggtggcaggcacctgtaatcccagctgctcgggaggctgaggcaggagaatcgcttgagcccaggaggtggaggttgcagtgtactgagatcccaccaccgcactccagcctgggcgactgagtgagactacatctcaaaaaataaaataaaaaaataaatattgtaaaaatgtaaagattttgatgtctgaatctaaaatttattaatctgtaatattttcatttgcaaatttttgttacttgagtatgccaaggaaaagagttttatacttggataaattaattttctgtcagcttgataatcaagtttaatgtaacaggagtagtatgggtcaccttgcaataccattagttggatgcctcatttaattggccccattcactggcaaaa

SEQ ID NO: 231 - DNA, 6503 bp, Homo sapiens
  LSN; CD43; GPL115
aagcttgctaattagaggaaagtcaggaaatgggaaccattcaaagaagaaaatacccccacctcctactctcacctatccaaagacaattaggtgaatcccttagtagatatctttccagacggttttccatatagattcccatatctggccaggcgcggtggctcacacctgtaatcctagcgcttggggaggctgaggcggatggaccacctgaggtcaggagttcgagaccagcctgaccaacatggagaaacctcgtctctacgaaaaatacaaaattagccgggcacagtggtgcaagcctgtaatcccagctactcaggaggccgaggcaggagaattgcttgaacctaggaggcagacattgtgctgagccgagccaagatcatgccattgcactaaactccgccttaaaaaaaaaaaaaaaagattcccacatctttactagtttgcagaaataagatcctagcatatgcagtgtgtaggaaccaccttggtttagccacgtctctgtgactgggggccactgtggtgacccccagctccccggacagagtcaagagctcaccagcctgcaaaggttttcacggcccccagccagactcgggggcttcctcttgccctgctacttcctgggagctctgagggcaggaaatggcgccactcagctcctggcctaacagcttggggaccacaaatgcaaaggaaaccaccctcccctcccacctcctcctctgcacccttgagttctcaggctcacattcccaccacccacctctgagcccagccctccctagcatcaccacttccatcccattcctcagccaagagccaggaatcctgattccagatcccacgcttccctgcctccctcaggtgagccccagacccccaggcaccccgctggcccctgaaggagcaggtgatggtgctgtcttcgcccagcagctgtgggagcaggcgggtggggcaggatggaggggtgggtggggtgggtggagccagggcccacttcctttccccttggggccctgtccttcccagtcttgccccagcctcgggaggtggtggagtgacctggccccagtgctgcgtccttatcagccgagccggtaagagggtgagacttggtggggtaggggcctcagtgggcctgggaatgtgcctgtggcttgaaaagactctgacaggttatgatgggaagagattgggagccattgggctgcacagggtcagggaaggccaggaggggctggtcactgctggaatctaagctgctgaggctggagggagcctcaggatggggctgatgggggagctgccagcatctgttcctctgtcatttctgataacagtaaaagccagcatggaaaaaaccgttaaaccgcaggttgggcctggccgttggcagggaagtgggcagaggggaggcccggccaggtcctccggcaactcccgcgtgttctgcttctccggctgcccacctgcaggtcccagctcttgctcctgcctgtttgcctggaaatggccacgcttctccttctccttggggtgctggtggtaagcccagacgctctggggagcacaacagcagtgcagacacccacctccggagagcctttggtctctactagcgagcccctgagctcaaagatgtacaccacttcaataacaagtgaccctaaggccgacagcactggggaccagacctcagccctacctccctcaacttccatcaatgagggatcccctctttggacttccattggtgccagcactggttcccctttacctgagccaacaacctaccaggaagtttccatcaagatgtcatcagtgccccaggaaacccctcatgcaaccagtcatcctgctgttcccataacagcaaactctctaggatcccacaccgtgacaggtggaaccataacaacgaactctccagaaacctccagtaggaccagtggagcccctgttaccacggcagctagctctctggagacctccagaggcacctctggaccccctcttaccatggcaactgtctctctggagacttccaaaggcacctctggaccccctgttaccatggcaactgactctctggagacctccactgggaccactggaccccctgttaccatgacaactggctctctggagccctccagcggggccagtggaccccaggtctctagcgtaaaactatctacaatgatgtctccaacgacctccaccaacgcaagcactgtgcccttccggaacccagatgagaactcacgaggcatgctgccagtggctgtgcttgtggccctgctggcggtcatagtcctcgtggctctgctcctgctgtggcgccggcggcagaagcggcggactggggccctcgtgctgagcagaggcggcaagcgtaacggggtggtggacgcctgggctgggccagcccaggtccctgaggagggggccgtgacagtgaccgtgggagggtccgggggcgacaagggctctgggttccccgatggggaggggtctagccgtcggcccacgctcaccactttctttggcagacggaagtctcgccagggctccctggcgatggaggagctgaagtctgggtcaggccccagcctcaaaggggaggaggagccactggtggccagtgaggatggggctgtggacgccccagctcctgatgagcccgaagggggagacggggctgccccttaagtgtcggtgaatagtgaggctggaggccggaatctcagccagcctccagcaccttccctctcaccatcccactgccccctcgctcccatgtttccacccggcaccctgatcctcacccgaatctcctttttttttttcttttgagacagagtttcgctttgtcgcccaggctggagtgcaatgcacgatctcagttcactgcaacctctgcctcctaagttcaggcgattctcctgcctcagcttcccgagtaactgagattacaggcacccaccaccatgcccagctgcttttttgtatttttggtagagatggggtttcaccatgttggctaggctggtctcaaactcctgacctcaggtgatctacctgcctcagcctcccaaagtgctgagattacagacatgagcctccgcgccttgcctcctcacccacctcttcactctgaatcctcatgaggcttctcagccctggatttcctgctgccatcctcacccagcacccacaactagcgcctgggcagggcagggctggcacctctcaacgtctgtggactgaatgaataaaccctcctcatccacccctatttatctccatcaccatttccccctctttcttgttcctggaaacggctgctgagtctccatcggccaaacttatctgccctgtgatttctttgacaattctccttttcccccagaacccaccctgggttgaccagagtctgggaagaaggacaagagaacccggcaaactccctcctaggattaactttgtaaagcacccttgccctgtagctgcaagggctgtggaacctgggcagcccgcaaccacctttagctctgggccccccaggccagcctggagcatggctgggtggggccaccagcccatgctctcaggcgggcctgtgatctttcccagggcacatggactgtaggctggccctggcccacaccaccacactctccccagccatggacagaggcagccagaggcctcacggtttctcctccgagtttctggctgggtgtagttctcagaaaccccagtgcctgcgtgtgtccactcgtgggtgtggtttgtgtgcaagagctgaggatttggcgatgcttgggaggggtagttgtgggtacagacggtgtgggggtgggaagtggtgcagagactgaagagggtcaacctgggcatgggggacacagggactgctgagaacgtgcgtgtcatctttgctctgatggggtggacatagcagaaaatctaactctgtctgtagccccatacagaatgccagggtgagcacagtggctggtgcctttaatcccagcactttggaaagttgaggcaggaggatcgcttgagcccaggagttcgagtctgaagtgagctgtgattgcaccactgcacttcagcctgggcaacagagtgagcccctgtctcaaaaaagaaaagaaaaagaaagccaggcttcatggaaagatcgtatgtgtgacccaaatatgagttcttcagctcagccatggtaatcccttccttgaagtctccatttctgcagtacacatgcatgtgcgctctctctctctctctctctctcacacacacacacacacacacacacacgcgcgcgcgcgcgcgcgcgcgcgctctcctgcgaacagaggcagggggagaggggtttgccctggtctcggggactggtctggctggcgcttccccactgcacgtttccaggtttagtttgtctgtgtctcctcttccatcccaggggctgagccccttccatcctccaagaggaaccagtgagagtgagtgaaggaggggcctggagccagggacttcccctgtggggcctgggtggagaggggagaactcaatggtgctgcctttgagaccagcccagctacagcccaggagcacacatgggccagggcagttggtatttcccgaggacaaagaggaaattttcaaagaggaagttgttgagttagagcttgcggtggctgagagcagacaggttgacctgcaaaaaaagacaggggaggcatgtgagtgtgacagccctgctctgtggcctgggcaggagatgggggaaagggtcaggtgggggatgggctcgtgcagtgggagaggagacggagggagggagcgggaaggggcttgcttagtgggtgggaagagctgagctcggatggaaccagcttctaccagccaggctgggcacccactgggctgcatctggtggccttttctgattgctatttggactcactgcagctgcagaatgacagaggccatgtccaaaatcccttagagacactgttgtcttagagttgttaaaataagagcccccatatcaggtttagaaaatactgtcaccgaacgaacgtcgctgtcctcagctccacctccctttcctttgacagatatggttgttttctaagccaggactggttttagtcaggtcctgggcgaatcctgaaaaaaagaggtagtacgggtaaggaaggcacccaacagggctttcacaatccagaaaatatcaaaatataagtgttaaaagagaggcacaggccgggtgcggtggctcacgcctgtaatctcagcactttgggaggccaaggtgggcagatcatgaggtcaggagtttgagaccagcctggccaatatgatgaaaccccgtttctactaaaaatacaaaagttagccaggcatggtggtgtgctcctgtaatcccagctacttaggaggctgaggccagagaattgcttgaaccctggagtcagaggttgcagtgagccgggatcatgccactgtactccaggctgggtgacaaagtgagactgtctcaaaaaataaaaataaataaaataaataaaagagaggcacaaacagtgttatgaatgcaccaaggaaaatggtgcattcataactctcaggtgaagcctaccaagccatgcgtgtgtgcacatatgtgtgtacgtgtgcatgtgcgtgcgtgcatgtgcgtgcgtgcatgtgcctgtgtgtgtatgtgtgcacatgtgtgtgcgcatgtgtgtgtgtgcgcgcatgtgtgtgtgcatgcatgttctcccatgcatgtgtactgtggcaagggagactttgaggaagagattccagtggctgagcagaagggctcgcattgccctggcgaaaggttggaaggcttcacctgagagtgtgtcgtggcctttgtcatatccactgcttgattcctttctttaaaaattatttttattgttttctacatatgagaaccaccacacctggctaatttttgtattttttgtagagatggggtttcaccatgttgtcccggctggtctcaaactcccgggcacaagagatccacctgcctcagcctcccaaaatgctgggactataggcatgagccactgcacccagccactgcttcattcctggtggctgctgtgcctggcatgttgcagatcctccatgaatatgcatttgaatgaatgaatgaatgaatgaatgaatggagatgacgcctcagagattctttcttttgagatgaggtctcattctgtcacccagactagagggcagtggtgcaatcacagctcaccacagcctcaacctcctgggcctcccaagtagctgcgatcacaggtgtgcaccaacatgcccagctaattttttttttaatttttaatttgtacagacagggtcttgctgtgttgcccaggctggtctcgaactcctgggctcaagtggtcctcccacctaagctt

SEQ ID NO: 232 - DNA, 756 bp, Homo sapiens
  CFB
  modified_base (525)..(525): a, c, t or g
  modified_base (608)..(608): a, c, t or g
  modified_base (690)..(690): a, c, t or g
  modified_base (698)..(698): a, c, t or g
  modified_base (738)..(739): a, c, t or g
  modified_base (750)..(750): a, c, t or g
ttgcagatgagcttatggggggcaatcttaaaaagtccacagcagatgcatccggctcgaggggccatcagctttgaataaatgcttgttccagagcccatgaatgccagcaggcacccctcctttcctggggtaaaggttttcagatgctgcatcttctaaattgagcctccggtcatactagttttgtgcttggaaccttgcttcaagaagatccctaagctgtagaacattttaacgttgatgccacaacgcagattgatgccttgtagatggagcttgcagatggagccccgtgacctctcacctacccacctgtttgcctgccttcttgtgcgtttctcggagaagttcttagcctgatgaaataacttggggcgttgaagagctgtttaattttaaatgccttagactggggatatattagaggaagcagattgtcaaattaagggtgtcattgtgttgtgctaaacgctgggagggtacaagttggtcattcctaaatctgtgtgtgagaaatggcangtcctagtttgggcattgtgattgcattgcagattactaggagaagggaatggtgggtacaccggtagtgctccttttgttcntgcttcgtttttttaaacttgaactttacttcgttagatttcataaatactttcttggcattccagtaagaaggaccctgangtgggaanttgtggggggggaggggggaagaaaggggacagctttggnnaccgggccccnttgggc

SEQ ID NO: 233 - DNA, 1368 bp, Homo sapiens
  HIG2; FLJ21076; MGC138388
gagggcgcttttgtctccggtgagttttgtggcgggaagcttctgcgctggtgcttagtaaccgactttcctccggactcctgcacgacctgctcctacagccggcgatccactcccggctgttcccccggagggtccagaggcctttcagaaggagaaggcagctctgtttctctgcagaggagtagggtcctttcagccatgaagcatgtgttgaacctctacctgttaggtgtggtactgaccctactctccatcttcgttagagtgatggagtccctagaaggcttactagagagcccatcgcctgggacctcctggaccaccagaagccaactagccaacacagagcccaccaagggccttccagaccatccatccagaagcatgtgataagacctccttccatactggccatattttggaacactgacctagacatgtccagatgggagtcccattcctagcagacaagctgagcaccgttgtaaccagagaactattactaggccttgaagaacctgtctaactggatgctcattgcctgggcaaggcctgtttaggccggttgcggtggctcatgcctgtaatcctagcactttgggaggctgaggtgggtggatcacctgaggtcaggagttcgagaccagcctcgccaacatggcgaaaccccatctctactaaaaatacaaaagttagctgggtgtggtggcagaggcctgtaatcccagttccttgggaggctgaggcgggagaattgcttgaacccggggacggaggttgcagtgaaccgagatcgcactgctgtacccagcctgggccacagtgcaagactccatctcaaaaaaaaaaagaaaagaaaaagcctgtttaatgcacaggtgtgagtggattgcttatggctatgagataggttgatctcgcccttaccccggggtctggtgtatgctgtgctttcctcagcagtatggctctgacatctcttagatgtcccaacttcagctgttgggagatggtgatattttcaaccctacttcctaaacatctgtctggggttcctttagtcttgaatgtcttatgctcaattatttggtgttgagcctctcttccacaagagctcctccatgtttggatagcagttgaagaggttgtgtgggtgggctgttgggagtgaggatggagtgttcagtgcccatttctcattttacattttaaagtcgttcctccaacatagtgtgtattggtctgaagggggtggtgggatgccaaagcctgctcaagttatggacattgtggccaccatgtggcttaaatgattttttctaactaataaagtggaatatatatttcaaaaaaaaaaaaaaaaaa

SEQ ID NO: 234 - DNA, 2000 bp, Homo sapiens
  xCT; CCBR1
cctgtgaacactatagcgctgagagagacagtctgaaagcagaggaagacatcgatcagtaacaccaagagacaccaaagttgaaagttttgttttctttccctctgttttatttttcccccgtgtgtccctactatggtcagaaagcctgttgtgtccaccatctccaaaggaggttacctgcagggaaatgttaacgggaggctgccttccctgggcaacaaggagccacctgggcaggagaaagtgcagctgaagaggaaagtcactttactgaggggagtctccattatcattggcaccatcattggagcaggaatcttcatctctcctaagggcgtgctccagaacacgggcagcgtgggcatgtctctgaccatctggacggtgtgtggggtcctgtcactatttggagctttgtcttatgctgaattgggaacaactataaagaaatctggaggtcattacacatatattttggaagtctttggtccattaccagcttttgtacgagtctgggtggaactcctcataatacgccctgcagctactgctgtgatatccctggcatttggacgctacattctggaaccattttttattcaatgtgaaatccctgaacttgcgatcaagctcattacagctgtgggcataactgtagtgatggtcctaaatagcatgagtgtcagctggagcgcccggatccagattttcttaaccttttgcaagctcacagcaattctgataattatagtccctggagttatgcagctaattaaaggtcaaacgcagaactttaaagacgccttttcaggaagagattcaagtattacgcggttgccactggctttttattatggaatgtatgcatatgctggctggttttacctcaactttgttactgaagaagtagaaaaccctgaaaaaaccattccccttgcaatatgtatatccatggccattgtcaccattggctatgtgctgacaaatgtggcctactttacgaccattaatgctgaggagctgctgctttcaaatgcagtggcagtgaccttttctgagcggctactgggaaatttctcattagcagttccgatctttgttgccctctcctgctttggctccatgaacggtggtgtgtttgctgtctccaggttattctatgttgcgtctcgagagggtcaccttccagaaatcctctccatgattcatgtccgcaagcacactcctctaccagctgttattgttttgcaccctttgacaatgataatgctcttctctggagacctcgacagtcttttgaatttcctcagttttgccaggtggctttttattgggctggcagttgctgggctgatttatcttcgatacaaatgcccagatatgcatcgtcctttcaaggtgccactgttcatcccagctttgttttccttcacatgcctcttcatggttgccctttccctctattcggacccatttagtacagggattggcttcgtcatcactctgactggagtccctgcgtattatctctttattatatgggacaagaaacccaggtggtttagaataatgtcagggttcctagcactgatgcctgcacaagcatgtgatatgtgaaataaaatggattcttctatagctaaatgagttccctctggggagagttctggtactgcaatcacaatgccagatggtgtttatgggctatttgtgtaagtaagtggtaagatgctatgaagtaagtgtgtttgttttcatcttatggaaactcttgatgcatgtgcttttgtatggaataaattttggtgcaatatgatgtcattcaactttgcattgaattgaattttggttgtatttatatgtattatacctgtcacgcttctagttgcttcaaccattttataaccatttttgtacatattttacttgaaaatattttaaatggaaatttaaataaacatttgatagtttacataataaaaaaaaaaaaaaaaaaa

SEQ ID NO: 235 - DNA, 604 bp, Homo sapiens
  LPIN1
  modified_base (523)..(523): a, c, t or g
gctgtgcactccggggagacctatcctttaatgggtgacaacaggctctgcactgctggcaagaggctgcttgggacattttacgctgaggcagaatgaatgtcctggttttcaaaaggtggcagtggctctctccaaaaggtgaagttactgaaggtatccgaacagggaaagtctgaagaatggcttcttttcagcaacgggaaaacgtggtcgactacttcacagagtctcacatacgaagagatgttggtctttgcatgttcctgtaccagctctcctttagggttgacggtaaatattctattcaaagacactcctacttgcttgtatgaatacacatcagctggtcggtttccaaaagcagcataaaagggttctgtgttggggaaaaacaggtttttgatgtctgtcaaacactggactttaaacttttctggcttcttttcaatcacttctctgtgcagggcagagaagaggctgctgggactcagcagcaggggcccctgggcagcaccgtgcncctctcgttgacccagtgcaggtagccccgcgtcatgtccgccatcccgatggcacgggcagaacagtagagaaattatat

SEQ ID NO: 236 - DNA, 5579 bp, Homo sapiens
  KIAA1240; MGC88424
gtgaagatgaaaatgctttatcaatttttgagaccaattgtcactcaggatcaccaaagaaacagtcatcatctgctgctatacataaaccctaccttcattttacaatgtcaccatatcatcagccaacctcttacaggccacgcttattgctctctggagaacggggctcaggtcaaacttctcaccttgctccagcacttttgcacactctagaaagattctctgtgcatagactagatctcccagcactttattcagttagtgccaaaacacctgaggaatcatgtgcacagatttttcgtgaagctcgaagaacagtacctagtattgtttacatgcctcacattggggattggtgggaagctgtcagtgaaactgtgagagcaacttttctgacattgctacaagatataccatcattttcacctatatttttattgtctacctctgaaaccatgtacagtgaactgcctgaagaggttaaatgtatctttagaatacagtatgaagaggtcttgtatattcaaaggcctattgaagaagacagaagaaaattttttcaagaattgattctcaatcaggcatcaatggctccaccacgaaggaaacatgctgctctttgtgctatggaagtgcttcctcttgcactaccttctccacctcgtcaattatcagaatcagaaaaaagtcgaatggaggaccaggaggaaaatactttaagagagttgcggttgtttctcagggatgtaaccaagaggctggccacagataaacgctttaacatcttcagcaaaccggtttcagattatcttgaagtaatcaaggaaccaatggacttatcaacagtaataactaaaattgataaacataattacctgactgcaaaggatttcctgaaagatattgacctcatctgtagcaatgctttagagtataatccagataaggacccaggagataaaataattaggcacagggcttgtaccctgaaggacactgcacatgctatcattgcagctgaattagatccagaatttaataaactttgtgaggaaattaaggaagcaagaataaaaagaggcttatcagtaacatcagaacaaataaatcctcatagtactggagctcggaagacagaaactagagtcgaagaggcatttcggcacaaacaaagaaatccaatggatgtgtggcacaactctgcaaataaatgtgcatttcgggttcggagaaaatcaaggcggagatcacagtggggtaaaggaattattaagaaaaggaaagttaataatttaaaaaaagatgaagaagacaccaaatttgcagactatgagaaccatacggaggacaggaaattattagagaatggagagtttgaggtaagcactgactgccatgaggaaaatggagaagagactggagacttatctatgaccaatgatgaatcatcctgtgacatcatggacttggaccaggggcagaggcttaacaatggagcaggcacaaaagagaactttgcatctactgaggaggaaagttcaaatgaatctctactggtcaacagcagcagttccttaaacccggagcagacctccaggaaagagactttccttaaaggaaattgtctaaatggtgaggcttccactgacagttttgaaggaataccagttctggaatgtcagaatggcaagcttgaagtagtttctttctgtgatagtggagataaatgtagttctgaacaaaagattcttctggaggaccagtcaaaagaaaaaccagaaacttcgactgaaaatcatggagatgatcttgagaaactagaggcactggaatgtagcaataatgagaagttagaacctggctctgatgtggaggttaaagatgcagaactggataaagaaggtgcttctaaagtaaagaaataccgtaaattaattttagagcaggcaaaaacgacaagcctggaactggttccagaagagccatctgagcctgtgcctcctcttatagttgatcgtgagagattgaagaaattgcttgatttgttggtggataaaagcaacaatctggcagttgatcagcttgagagattatattctcttcttagtcagtgtatctaccgtcatcgtaaagattatgacaaatcacaacttgtagaggagatggaaagaacagttcatatgtttgagacattcctatgaacttttcaagatgagtggtttatcctctccaatctgctcctcacagagcagtcttctgagccattcaatttcaaattgcaccaattatgtgcagagccttggtgtaaagtgctctctcactcattctttctctctgttgaatttggtgctattgtctcaggtacctgaaaccaaccagcctacaagaaccaaacagaacttcagaaacatgttgtattttccacaaataaaaaatacaaccccacagcttggagattttggtgctacagaaactgctctcgcttctgctcctctttttgtgcactctcttttggagactcctctcttagggagcagaccagcaaacaggaggaaactggatgggggcagttctaactgtgttgaattgtttaaacagtgggcaacttgttatttttttttcctccattttacccctttaatcatatttttcccccatctgggtaatggactgaaacctgttttagagttggctatggtctgttctggtgggaagctgaagaaactggatgaaattaggtcaggctctttagaactgcctttaacgtgcctttttattcatttgaggaagataaggctaaaaggatgggctgtttgaagcaaataaattagaaatatttctttggtcacaaccttgaaaataagttttgatactctatgtcattaagagacaaccagtgtttgggtatgaaatgcctgtcttattctcaaagctcaatcaagacacccagtaagccacataatatactaaaatggtaagttttcttgtaaggtctgttttggtttaagaaacatgaataacaacaaagaataatacacagtccacacacaaaaaaacaaaaaacaaaactgcacacgttttggtattgccaacaatgatgactagaaaataaatagatagtggccattttttcttctgtcagtggcaatttaatagttattcatgtttgagttcccagagaaaaatggttttcatatgtagtaaattgttgttttgttttaaagccaggacttgccaaatggacagaaaagagaggaattcatcagaagctccataaaattcattttctgtatgcttaattgcaaacgagctctggtatggtccttgaataacagtattaatgtttaaatcccatctcctaagcttaccttcacaactcttctttttgattggaaaccattttgaatcttgttgagtgatttctgtgaattgtatgtatctgaaattaattatgggttactagttttacaaaaactttctacaaatttggagacacagtctaggcagttgcaatgaggcaaaggatgcagtgactttttttatcagatgatttttaaacaaaaagaaaattttgccagcaagttggcttggtatcttcattcattgtagccgttagctgcaggtgtgtctttccaatatatgcaacacatgtagtttgggttttaattagggcgaatggtcttggactactgcagagattctgagctacctcagctttttgtattttagttaccaacagtgtttacagagtcttgtaatcactttgccaccgtttacatcctgaagctaaggtacttgtctccttgtctttggctctttgtagtgtgcagaaagcatactttggccatagcctactgcagtaatccaaagtgcttctttgcatttacatttacatctaacgccttctaattctagcttaatttttttttaaatgccacgtgttttctttgtacctagtctgtgaagtttctgtaatatccagttagtcatacaagtcaagatgctacccatgtagacacactgtatttttaaggtgggcaagtgcgattaacgatgaaccattttaaaggggaggttatttgaaacctctaatttgattattgggaggattttcatgctttctttagtatttattaccatcataccgattcaaactattttattgtctaatacattagcattttgtattttgatggaaattgttacagaatttaaagatttgatgaaataagatgtagcagattttttgtagcaagtttctggtaaaagggttttttgcaagtctcaggttcttgctgcactatttttttttaaatatttattccagttattctaattcagaagcattcttttcaagtaacagcagcacttgtgaaaggaaaaaaaaatgcacatgtttcttagtaggttactaaatttgtacaattaattaagattttagccatcagtgagtttgaaaagggaaatgtatttattttcagcattaaaatgcttccaaaagatcaagttgcttttgtttgtttgtttttttaaccgtaatgtagatggagaaattggaggcaacctcagtataggaactgccactttgaacagtttaggtcttaaagagaaagtcaatctaatgccaaggggagaacaatgagctgaaattgtaccaactcctctggccctccttccctcaattaaaaaaacacacttaccagttttgcttattttacagatatctggtggttctatagtttaaagcagcttgtgaaattaaaaaagtggactcaattttgtttacctttctgtaagtttttcatttttgctgtatagcattggcaaaaatatgtacaaattgacctctgttcttatttcctattgtgagcattataaagataagctcctatgtaaaaccttgctctcagatgagtaaaatatgtatcacagcatagctcagcaataattcatgctcagctgtggggaccctgggggctttttgaagatgatggaaccgcactagggttgaaactgatggctgtggagttaattgtgttttcgagcttgaatctcacctgtgattttttttttttaatgttgtttcatgacttgatttttctcataagccaatgtatttgtaggtttactggattttatttttagggagtgggtaatttcttcccttttttgattaagttggttcagctatggtgctattcagtaggtatcttcagtgtcaggtcccgtagctgaatgccattgttattataattattatttgtaatcacattgtaagcttgaatttgggcttgtacctgcatcttttgtattctgtacatctggttacttagactttgggagtccaatttggtttcagtcatgtatgtctactttgtagtttaagtagacttcatcaactatggtctattttgggtttgtagttttaatttagaattgtgttaaattgatgttttgcatttgacttcatttgacattagttgaagtaaattatttaatttttgaattctggaatttgaacatttactgtaatttgtaatataactgctgtgaaatacttgaataaagatgacaag

SEQ ID NO: 237 - DNA, 621 bp, Homo sapiens
  ACYPE
cggaggtttgcgcgccttggtgagccgttggcgtggtggtcccggagtgatcctggcagccggtggggaagacaaggagggtttgagcatggcagaaggaaacaccctgatatcagtggattatgaaatttttgggaaggtgcaaggggtgtttttccgtaagcatactcaggctgagggtaaaaagctgggattggtaggctgggtccagaacactgaccggggcacagtgcaaggacaattgcaaggtcccatctccaaggtgcgtcatatgcaggaatggcttgaaacaagaggaagtcctaaatcacacatcgacaaagcaaacttcaacaatgaaaaagtcatcttgaagttggattactcagacttccaaattgtaaaataatggcctgaatttaagttttctaagataaactcagtggtttggtttttattattaatagagatagaactattgtgtgttaatattagcattagtcaataagttattttaatgtcagatttttgaatgttattatatattacctgtatgatggaaggattaccactgtacacaaatctaatcaataaaaacgttagaaccttctgcttagagtacttttaaaaaaaaaaaaaaaa

SEQ ID NO: 238 - DNA, 298 bp, Homo sapiens
  NFIA
ttttttttttttttttttttttttttttttttttttttttttggcaacataaacacttaagcatttagggataaaatattaaaagctagaggctccaaatccaatgagtacaagttgctgatatagcatcatataccaaggaaaggggtcaagcatgctaaaatatgtctgtagcttaaacattaggggccctactcttcccctaatatgcttgccttgttcctactggccacagttaaatgcacacatcagcactaaaatgcatccccttaaaatctagggaggaaattcaacacat

SEQ ID NO: 239 - DNA, 639 bp, Homo sapiens
  modified_base (551)..(551): a, c, t or g
  modified_base (553)..(553): a, c, t or g
gcggccgccgccatgtcccaccagaccggcttctaagcaagtgaagatgttaaagagatctttgccagagccagaaatggaaagtacagacttctgaaaatatctattgaaaatgagcaacttgtgattggatcatatagtcagccttcagattcctgggataaggattatgattcctttgttttacccctgttggaggacaaacaaccatgctatatattattcaggttagattctcagaatgcccagggatatgaatggatattcattgcatggtctccagatcattctcatgttcgtcaaaaaatgttgtatgcagcaacaagagcaactctgaagaaggaatttggaggtggccacattaaagatgaagtatttggaacagtaaaggaagatgtatcattacatggatataaaaaatacttgctgtcacaatcttcccctgccccactgactgcagctgaggaagaactacgacagattaaaatcaatgaggtacagactgacgtgggtgtggacactaagcatcaaacactacaaggagtagcatntnccatttctcgagaagcctttcaggctttggaaaaaattgattatagacagctcaactatgtgcagttggaaatagatataaaaaag

SEQ ID NO: 240 - DNA, 2654 bp, Homo sapiens
  MSS4; STM7
aacttgcagactgtggcgcaactggtcttggtagcggaggcacccgaatgctgcccgggtgagatgaggaagccaaggcccagcagagctgagatgtgactgcagagccgtccaaccccagtcctgtgacctttctctggtgcctgatacctctcagcatttgagggccttttctcttcctgcttcatctctaaaggtccttctaggagagaggtgaaagaaacctggcaaagaaaacggtctcgacaatgagtaggccacccatcactactaactacagatgacttgccatttcatttacaaagatgtcttctgctgctgaaaatggagaggcagcacctggaaaacaaaatgaagaaaaaacctataaaaagactgcatcatctgctattaaaggtgctattcagctgggaataggatacacagtgggtaatctcacttccaagccagaacgagatgttcttatgcaagacttttatgtggtggaaagtgtgttcctacccagcgaagggagcaatctgaccccagcacatcactacccagactttagatttaagacatacgctccattagcattccgatatttcagagaactttttggtatcaagcctgatgattacttgtattccatctgcagtgaacctctaatagaactgtctaaccctggagccagtggatccttgttttttgtgaccagtgatgatgaatttatcatcaaaacagttcagcacaaagaagctgagtttcttcagaagctactgccaggctattacatgaatttaaaccagaatccaaggactcttttgccaaaattttacggactgtattgtatgcaatcaggaggcattaatatcaggattgtggtgatgaacaacgttttgccacgctccatgagaatgcactttacatatgacttgaaaggctcaacgtataagcgaagagcatcccgtaaagagagagagaaatccaaccccacatttaaggacttagatttcctgcaagacatgcacgaagggttgtattttgatacggaaacatacaacgcgcttatgaaaacacttcagagagactgccgggtgctagaaagcttcaagatcatggattatagccttctgttgggaattcatttcctggaccattccctcaaagagaaagaggaggagaccccacaaaatgtgcctgatgctaagcggactgggatgcagaaggttctctactcaacagccatggaatctatccagggtccagggaaatctggagatgggataatcacagagaacccagacacaatgggaggcattccagctaaaagccataggggagaaaaactacttttatttatgggcattattgacattctgcaatcatataggttaatgaagaagttagaacattcctggaaagctcttgtttatgatggggacactgtttctgttcatagaccaagcttttatgcagacagatttcttaagttcatgaattccagagttttcaagaaaattcaagctttgaaggcttcaccgtctaagaaacggtgcaattcaatcgccgccctaaaggccacttcacaggagattgtgtcctcaattagccaggaatggaaggatgagaagcgggatttgctgactgaaggacaaagttttagcagccttgatgaagaagccctgggatcccgacacaggccagacctggtccctagcactccatcactgtttgaagctgcttccttggcaaccacaatttcatcttcttccttatacgtcaatgagcactatccacacgacaggcctacactctattcaaacagcaaagggttaccttccagttcaacatttaccttggaagaggggaccatctacttgaccgctgagcccaacactctggaagtgcaggatgacaatgcttctgtgcttgacgtctatttataagtgaaaatggtgatcacctaagcacatggatgagacgtgagcacagttatggcagagaagtttctccgcaccagaattatccacagcaacttggctgagccccactacacacagagaaatcatcaacctgacttaagagttttcaagatgtcaacttcaggctgatcagcagatgggatgtgaaaaatactaccctattctatcatttgctgttgcttgctgaactgtgaagaactgcatgaactatatttaagctgctttctgtaccattgccaatcacctttttggagttggaagtgctattttcctatggacttttgcattatttcattgtgcatgcatccagtgattatacataagcaacatatgtaatctgcttatatatttttaaaaatccatccacacacatggtaaattaagtataaattcttttgcaaaattatagttcatgtcattgaaagtttaaattggtttcatttaaagatcaatatactaggtctgccttcactttatagaaaactagcttctataaagattttttcactgtttactagtgaaatgagaaaagcaaagctatttataaaaggccttatgtcgtgtacatacattgtctttgaaatatttgtgatctagtttattgcttgtaaaagagaaattatataatttatttagtaaatactactgtaaactatagttttgtgagagaaataaaatattttgttctca

SEQ ID NO: 241 - DNA, 602 bp, Homo sapiens
  KLF6
aagtgggagcttttggtgtaaactttcctgcagccgttaaagtggcaccggtgcaccctcctcctgccgtcgggggaggcatcgccatttcccttgtcacctggcttccccgaagtcccgctgcgcaccttccctggcgagggcagctccccgggcacgcaaccccacagttgagaaggttccctgctcagttccggagaagatggaggcgtggaggtgacagaggagctcaattttcccgagctgaccaaaacttcgccaatggggtcggaggtaaacttggccgtgggagaaagttcctcggagctgtcagaggattcgctgctgacatctgagttcaggctgttggtctctaagttgtaacaaaagctcgggctgatgagagtgtcctctggaggactggaagatatcttcagttcggattcctcctttttctcccgagccagaatgattttggtccacagatcttcctggctgtcaaatttgattgctgaggctgaaacatagcagggctcgctctggaggtaacgtgccagctctagggatgtcttgtgtcagtactccttcagagactgcagcagcctataagtatccggatcttg

SEQ ID NO: 242 - DNA, 541 bp, Homo sapiens
  VPF; VEGFA; MGC70609
atgaactttctgctgtcttgggtgcattggagccttgccttgctgctctacctccaccatgccaagtggtcccaggctgcacccatggcagaaggaggagggcagaatcatcacgaagtggtgaagttcatggatgtctatcagcgcagctactgccatccaatcgagaccctggtggacatcttccaggagtaccctgatgagatcgagtacatcttcaagccatcctgtgtgcccctgatgcgatgcgggggctgctgcaatgacgagggcctggagtgtgtgcccactgaggagtccaacatcaccatgcagattatgcggatcaaacctcaccaaggccagcacataggagagatgagcttcctacagcacaacaaatgtgaatgcagaccaaagaaagatagagcaagacaagaaaatccctgtgggccttgctcagagcggagaaagcatttgtttgtacaagatccgcagacgtgtaaatgttcctgcaaaaacacagactcgcgttgcaagatgtgacaagccgaggcggtga

SEQ ID NO: 243 - DNA, 938 bp, Homo sapiens
  modified_base (9)..(9): a, c, t or g
  modified_base (30)..(31): a, c, t or g
  modified_base (33)..(33): a, c, t or g
ttatdawdnktgttcttaatgctttaaacnnanaakattytyaaaatatatakacgyctcttttctcatagaaatagattattttttwtaatacaaaaaaagaccaaaaaacaaaacaaaacaaaacatcaacagcaacargcccgttggaacatctttaagcgattactcagggcccggctgacagttacacgtgggttgcgtcagtcccgtgtacacacgcgttcagccatgtttaaaccgattgcatcaacttcgaaaccggcccgcccgccggcgcctggvgaggggcagagggagaagcagagagtttatcattcatctgtacacatagacgtttcttctttaaataacaccacgggcgggagccccatctgcatgtgcggttggtttggacaaaaatatagatatatatatataatasvrtattavvmttmccgacgggctccccgcgctgccaagtgccccagtgccaaagttttgccggcsccgccgcgggcgggggcgagggcgcgggcgcgggcgctccccggagtctcagccccggccggcagggggacgcgcgcgggggccgcgctagcagtggccggaggaggcgagcgggggctcgggcagctgcttgaacaagtgccgcaggtgctgagctcgcgcgacacksgckccacctkctkctgcagccgckcgtgckcggccgkgagcgccaggaccttgtgctgcgtctccaggkkgcgcatctgggcctkgtcgcggctctggcgcacggcgatgtkstgscsctcsccccgsatctkgtgctcskcgctgtgcttgtccacsgtctkctkggcctkgctctggayctgcgagsscsccsgcgcssccccgcstacaggcgggtcgggggcgcttggctgcacggggctccgcgtgccgggcggctggacgaggagactggagag

SEQ ID NO: 244 - DNA, 3958 bp, Homo sapiens
  EVI9; CTIP1; BCL11A-L; BCL11A-S; FLJ10173; FLJ34997; KIAA1809; BCL11A-XL
ttttttttttttttttgcttaaaaaaaagccatgacggctctcccacaattcatcttccctgcgccatctttgtattatttctaatttattttggatgtcaaaaggcactgatgaagatattttctctggagtctccttctttctaacccggctctcccgatgtgaaccgagccgtcgtccgcccgccgccgccgccgccgccgccgccgcccgccccgcagcccaccatgtctcgccgcaagcaaggcaaaccccagcacttaagcaaacgggaattctcgcccgagcctcttgaagccattcttacagatgatgaaccagaccacggcccgttgggagctccagaaggggatcatgacctcctcacctgtgggcagtgccagatgaacttcccattgggggacattcttatttttatcgagcacaaacggaaacaatgcaatggcagcctctgcttagaaaaagctgtggataagccaccttccccttcaccaatcgagatgaaaaaagcatccaatcccgtggaggttggcatccaggtcacgccagaggatgacgattgtttatcaacgtcatctagaggaatttgccccaaacaggaacacatagcagataaacttctgcactggaggggcctctcctcccctcgttctgcacatggagctctaatccccacgcctgggatgagtgcagaatatgccccgcagggtatttgtaaagatgagcccagcagctacacatgtacaacttgcaaacagccattcaccagtgcatggtttctcttgcaacacgcacagaacactcatggattaagaatctacttagaaagcgaacacggaagtcccctgaccccgcgggttggtatcccttcaggactaggtgcagaatgtccttcccagccacctctccatgggattcatattgcagacaataacccctttaacctgctaagaataccaggatcagtatcgagagaggcttccggcctggcagaagggcgctttccacccactccccccctgtttagtccaccaccgagacatcacttggacccccaccgcatagagcgcctgggggcggaagagatggccctggccacccatcacccgagtgcctttgacagggtgctgcggttgaatccaatggctatggagcctcccgccatggatttctctaggagacttagagagctggcagggaacacgtctagcccaccgctgtccccaggccggcccagccctatgcaaaggttactgcaaccattccagccaggtagcaagccgcccttcctggcgacgccccccctccctcctctgcaatccgcccctcctccctcccagcccccggtcaagtccaagtcatgcgagttctgcggcaagacgttcaaatttcagagcaacctggtggtgcaccggcgcagccacacgggcgagaagccctacaagtgcaacctgtgcgaccacgcgtgcacccaggccagcaagctgaagcgccacatgaagacgcacatgcacaaatcgtcccccatgacggtcaagtccgacgacggtctctccaccgccagctccccggaacccggcaccagcgacttggtgggcagcgccagcagcgcgctcaagtccgtggtggccaagttcaagagcgagaacgaccccaacctgatcccggagaacggggacgaggaggaagaggaggacgacgaggaagaggaagaagaggaggaagaggaggaggaggagctgacggagagcgagagggtggactacggcttcgggctgagcctggaggcggcgcgccaccacgagaacagctcgcggggcgcggtcgtgggcgtgggcgacgagagccgcgccctgcccgacgtcatgcagggcatggtgctcagctccatgcagcacttcagcgaggccttccaccaggtcctgggcgagaagcataagcgcggccacctggccgaggccgagggccacagggacacttgcgacgaagactcggtggccggcgagtcggaccgcatagacgatggcactgttaatggccgcggctgctccccgggcgagtcggcctcggggggcctgtccaaaaagctgctgctgggcagccccagctcgctgagccccttctctaagcgcatcaagctcgagaaggagttcgacctgcccccggccgcgatgcccaacacggagaacgtgtactcgcagtggctcgccggctacgcggcctccaggcagctcaaagatcccttccttagcttcggagactccagacaatcgccttttgcctcctcgtcggagcactcctcggagaacgggagcttgcgcttctccacaccgcccggggagctggacggagggatctcggggcgcagcggcacgggaagtggagggagcacgccccatattagtggtccgggcccgggcaggcccagctcaaaagagggcagacgcagcgacacttgttcttcacacacccccattcggcgtagtacccagagagctcaagatgtgtggcagttttcggatggaagctcgagagcccttaagttctgagaaaatttgaagcccccaggggtggggtggacgcgtgccgcccagtcgacgtcagcgtggtctgtcatcctgctagtttgtgatgttttctgacagtagcctccaagaagccgttgtgcgaagacagagtcctgcagagtccttccagcctaggcctgcagcgccattttatttatattttttaataaaaagtaaaaacaaaaaaacagacccacattggaacagtgaatcagtcccatagagagggcccgtggaccatcgctgtcatgagtgatgccctggcccttctgaaaccagccaacctaattacctgtattgtggaaatgcgcatgagtccccaaccccttgtttctatacattctatgttgtcttttaaaaagtgtgcttaacattgacacaataaatgttggagctttaggtggtgtttgcttgttctttaatttttaatgcttataagacaatgaggctgcttatgattttgtacttctgtacctgtttcctacagacacccatcgggtgggtaggaggaacagatttgagaaatgggcaggagatgtaggaggggaactaggttaccgcttatcagatggcataaattttcaaggagaatcaaaatgcaaaacttgggaataaatcatagcaatatcataattaatgtagtagtaatattgctgtttattaatgctgaagtgtggttttcctaactgtctgacttataatttgcataccattaaataatgcataatatggcacgccgaatcctgtttttcaaatatatgcttttggtggctaccatgcaggatttgaatttgtcttttaatttagcttaggaaagaacatcactgggcgagcggtaaatcctaaagaaggtgataaatgtcagtagtttcttattaaatattctaattttaggttcccaaaccttcaggaaatatatcttaatgcagacaaacaaacataaaacttctttagtacttacatcaggaaatttggggcagattttagaggggggaaattataggaggaaagaagttcacatcagaacagacaatcacagcaatgctctattccttagaaattagtgccacaaataagttacatctacaaacaggtggtaaaaattctttctggcccagttaatttgcacagaacttttctcagtttggtattttttactgcttggagatccagaagagaattagaaacaacatagcaaattaaaataggtttgtcaataatagagctcagacacctgtgtgctgtagattcacatacaggccgtgaacctaagtggggaaaatcctacctatccaccttctggctagattacctagcttagtgaaaagatagccaaataattggcatgtgaattatttcctgcttattcataataaataatgactgtcta

SEQ ID NO: 245 - DNA, 487 bp, Homo sapiens
  HBA2
  modified_base (433)..(433): a, c, t or g
  modified_base (471)..(471): a, c, t or g
aggcacatatttattttattttttttaatataaaagtaaaagagtacattgttgagtagaggattaaaggagtgacgaccctttctaaagtggggtctcccatcccggatccctaagactgtaacatctgctacatacattaaaaacaaaacaaaacaaaagcaaacatgaaacttatgacctgacttcactccacccttcatgcctgcattatgacagaaacacgtcccactgctcctacttatgtatgtacatccagagctccaaacctaagctgtggccccctcctcccagccctacccacatccaccctacttcccaaaagcctgtagaagcccccacttagaaaaaaagggcagacatacacatacacagaaacacatatctatctggcagctcctccatgtgaagcccctggaaacatacacacccngggacttttcctctccttatggcacagatgggacaggntggcctttcccctgtt

SEQ ID NO: 246 - DNA, 1745 bp, Homo sapiens
  TTP; G0S24; GOS24; TIS11; NUP475; RNF162A
agcctgacttcagcgctcccactctcggccgacacccctcatggccaaccgttacaccatggatctgactgccatctacgagagcctcctgtcgctgagccctgacgtgcccgtgccatccgaccatggagggactgagtccagcccaggctggggctcctcgggaccctggagcctgagcccctccgactccagcccgtctggggtcacctcccgcctgcctggccgctccaccagcctagtggagggccgcagctgtggctgggtgcccccaccccctggcttcgcaccgctggctccccgcctgggccctgagctgtcaccctcacccacttcgcccactgcaacctccaccaccccctcgcgctacaagactgagctatgtcggaccttctcagagagtgggcgctgccgctacggggccaagtgccagtttgcccatggcctgggcgagctgcgccaggccaatcgccaccccaaatacaagacggaactctgtcacaagttctacctccagggccgctgcccctacggctctcgctgccacttcatccacaaccctagcgaagacctggcggccccgggccaccctcctgtgcttcgccagagcatcagcttctccggcctgccctctggccgccggacctcaccaccaccaccaggcctggccggcccttccctgtcctccagctccttctcgccctccagctccccaccaccacctggggaccttccactgtcaccctctgccttctctgctgcccctggcacccccctggctcgaagagaccccaccccagtctgttgcccctcctgccgaagggccactcctatcagcgtctgggggcccttgggtggcctggttcggaccccctctgtacagtccctgggatccgaccctgatgaatatgccagcagcggcagcagcctggggggctctgactctcccgtcttcgaggcgggagtttttgcaccaccccagcccgtggcagccccccggcgactccccatcttcaatcgcatctctgtttctgagtgacaaagtgactgcccggtcagatcagctggatctcagcggggagccacgtctcttgcactgtggtctctgcatggaccccagggctgtggggacttgggggacagtaatcaagtaatccccttttccagaatgcattaacccactcccctgacctcacgctggggcaggtccccaagtgtgcaagctcagtattcatgatggtgggggatggagtgtcttccgaggttcttgggggaaaaaaaattgtagcatatttaagggaggcaatgaaccctctcccccacctcttccctgcccaaatctgtctcctagaatcttatgtgctgtgaataataggccttcactgcccctccagtttttatagacctgaggttccagtgtctcctggtaactggaacctctcctgagggggaatcctggtgctcaaattaccctccaaaagcaagtagccaaagccgttgccaaaccccacccataaatcaatgggccctttatttatgacgactttatttattctaatatgattttatagtatttatatatattgggtcgtctgcttcccttgtatttttcttcctttttttgtaatattgaaaacgacgatataattattataagtagactataatatatttagtaatatatattattaccttaaaagtctatttttgtgttttgggcatttttaaataaacaatctgagtgt

SEQ ID NO: 247 - DNA, 572 bp, Homo sapiens
  HK2
ttttttttttattttggaaaatgttaaaatttattaatgataggtaacatcacatagttaattaaactagttatgtattgtacataatgacaacatcttcactagactgagtgctcaaggatttgagatgattcgctattcatcacaccccgaagattgagatccactgtatttacacaaagcaaagccatgtcagcaagggactgtcaacctgattctgagaacataaacattcaaaatttattttccagggttcctttttggaaaccaaccaccaacatctttaatacctacacacacacacatctctacctttaaaaaaaaaaagtgtaacttcacagatagtacctaatcttcaagcttaaaatttaagttaaaattaatctctattttgtgggcaccctttagtgaactaaaatctacatgaaaccttttggcttttgtgtagcaggaaatacccacgttttgggtcaattagtgcagatgggagcagcagaggagctacaccagacagcaaagcaagactagagcaaacgagaaggaccagcccctagcccctctgtgctcccggg

SEQ ID NO: 248 - DNA, 6228 bp, Homo sapiens
  Zn-15L; ZNF292L; MGC142226
gccgtgggaagatggcggacggaaagggagacgccgccgctgtcgccggggctggggctgaggctccggcggtagcgggagccggagatggagtcgagactgagtccatggttcggggtcatcgccccgtatctccagcgccgggagcctcgggactgcggccgtgtctgtggcagctggagacagagctgagggagcaagaggtgtcggaggtctcatctttgaactactgccggagcttctgccagactttattgcaatatgcaagcaacaagaatgcatcagaacatattgtgtatcttctggaggtatatcgacttgccatccaaagctttgccagtgcacgtccatacttaactactgaatgtgaagatgtcctcttagtgcttggcagattagtactgagttgtttcgaattactgctttcagtgtctgaaagtgaactgccatgtgaagtctggctaccattccttcagtctctacaggagtcacatgatgcattattggaatttgggaataataacctacaaatattggttcatgttaccaaggaaggggtgtggaaaaacccagttcttcttaaaattctgtctcaacagccagtagaaacggaggaagtcaataaattgattgcacaagaaggaccttcctttctgcaaatgcgaataaaacatttgttgaaatctaactgcatcccccaggctactgctttatcaaaactatgtgcagaatctaaagaaatttcaaatgtgtcatcttttcagcaagcctatatcacatgtttatgttctatgctccctaatgaagatgctattaaggagattgcaaaggtcgactgcaaggaagtactagacatcatttgtaatctggaatctgaggggcaggataacacagcatttgttctttgtacgacttaccttacccagcagctccaaactgcaagtgtatattgttcttgggaactgactcttttttggagtaaactgcaaagaagaattgacccttctttagatacttttttggagcgctgtcgtcagtttggtgtcatagctaaaacgcagcagcatttattttgcctcattagagttatacaaactgaagcacaagatgctggtcttggggtgtcaattttactgtgtgtcagagctcttcaactcagatcaagtgaagatgaggaaatgaaggcatcagtttgtaaaacaattgcctgtcttttaccagaagatttagaagttagacgagcctgtcagcttacagaattcttaattgaacccagtttggatggatttaatatgttagaagaactatatttgcaaccagatcaaaaatttgatgaagaaaatgcaccggttccaaattctcttcgatgtgagctcttactagctttaaaagcccactggccttttgatcctgagttttgggactggaaaactttaaaacgacactgccaccaacttttaggacaagaagcctcagattctgatgatgatttaagtggctatgaaatgtccattaatgacacagatgttttagagtcatttctcagtgactatgatgagggtaaagaagataaacaatatagaagaagagatttgacagatcagcataaggagaaaagagacaaaaaacctattggctcttctgaaagatatcagaggtggcttcagtacaagtttttctgtttgttatgtaagcgggaatgtatagaggctagaattcttcatcattctaagatgcatatggaagatggaatttacacctgtccagtttgtattaaaaaatttaagagaaaagaaatgtttgttcctcatgtgatggagcatgttaaaatgccaccaagcagaagggaccgctctaaaaagaaattactgttaaaaggctctcaaaagggtatttgtcctaagagcccctctgcaatcccagagcaaaaccattcattgaatgaccaagccaaaggagagtctcatgaatacgtcacattcagcaaattagaagattgccacctgcaagacagagatttgtatccatgtcccggtacagactgttcccgtgtgtttaagcaatttaaatacttaagtgtgcatcttaaagctgaacaccaaaataatgatgaaaatgccaagcactacttggatatgaaaaatagaagagagaagtgtacttactgtcgacgacattttatgtctgcttttcaccttcgagagcacgaacaagtgcattgtgggcctcagccttatatgtgtgtatctatagattgctatgctaggtttggatcagtaaatgaactacttaaccataaacaaaagcatgacgatctgcgttacaaatgtgaattaaatggctgtaatattgttttcagtgacttgggacagctttaccaccatgaagcacaacactttagggatgcatcttacacatgcaacttccttggctgtaaaaagttctattactccaaaattgaataccagaatcacctctcaatgcataatgttgaaaattcaaatggagacataaagaaatcagtgaaacttgaggagtctgcaacaggtgaaaagcaagattgtattaatcagccccatctacttaaccaaactgataaatcacatttacctgaagatcttttctgtgcagaatcagctaattctcaaatagatacagaaactgcagaaaacctgaaagaaaacagtgacagtaattctagtgatcagttaagtcatagctcttcagcttcaatgaatgaagagctaattgacacactagatcactctgaaactatgcaggatgtattgttatctaatgagaaagtctttgggccctccagtttaaaagaaaaatgttccagtatggcagtttgttttgacgggactaagtttacctgtggttttgatggctgtggttccacatacaaaaatgcaagaggaatgcagaaacatttacggaaggttcatccataccatttcaagcccaaaaagataaagacgaaagatctgtttccctctttgggtaatgaacataatcagacaactgaaaagttggatgcagaacctaaaccctgctcagatacaaacagtgactccccagatgaaggtctagatcacaatattcacattaaatgtaaacgagaacatcaaggttattcctcagaatcctccatttgtgcttctaaaaggccctgtacagaggataccatgttggaacttctgttacgcttgaaacatttaagcttgaaaaactcaataacacatggatctttctcagggtcattgcaggggtacccatccagtggtgctaagtctcttcagtcagtttcatctatctcagaccttaattttcagaatcaagatgaaaacatgccaagtcagtaccttgcacagttggcggctaagccgtttttctgtgagcttcaaggatgcaaatatgaatttgtgaccagagaggctctgttaatgcattatcttaaaaagcataattattcaaaagaaaaagtccttcagttaaccatgttccaacatcggtattccccatttcagtgtcatatttgccaaaggtcatttacaagaaaaacacaccttaggattcattataaaaataaacatcaaattggcagtgacagagcaactcacaaactattagataatgaaaagtgtgatcatgaaggcccatgttcagtagataggttgaaaggtgattgttctgcagaacttggaggtgatcccagtagtaactctgagaaaccacactgtcatcctaaaaaggatgaatgtagttctgaaacagatttggaatcatcttgtgaagaaacagaaagtaaaacatctgacatttcatcaccaataggcagccatagagaagaacaagaaggaagagagggcagaggtagcaggcgaactgttgctaaaggaaatctgtgttatattttgaataaataccacaaaccattccattgtattcataaaacttgcaactcctcattcaccaatctaaaaggcttaattcgccattacagaactgtacatcagtacaacaaagaacagttatgtttggagaaagacaaagcaagaaccaaaagggaacttgtcaaatgtaaaaagatatttgcttgcaaatataaggaatgtaataaacgcttcctgtgttccaaagctcttgctaagcactgtagtgattctcataacctagaccatattgaagagcctaaagtactttccgaagctggatctgcagcaaggttttcttgtaaccagcctcagtgccctgctgttttttatacattcaacaagttgaagcaccacttgatggaacagcataatattgaaggggaaatacattcagattatgaaattcattgtgatcttaatggctgtggccagattttcacccatcgcagtaattactcacaacatgtatattaccgacataaagactattatgatgatttgtttagaagccagaaagtagcaaatgagagactactaaggagtgaaaaggtatgtcaaacagctgatactcaggggcatgaacatcagaccaccaggagatcatttaatgctaagtctaaaaaatgtggcttaatcaaagaaaagaaagccccaataagttttaaaaccagagctgaggccctccatatgtgtgtggagcactctgagctctctctgtacccctgcatggttcaaggatgcttatctgtggtgaagttggagagcagcattgtgaggcattacaaacgcactcatcagatgagtagtgcctatttagagcaacagatggagaatcttgttgtttgcgttaagtacggtaccaaaattaaggaggaacccccttctgaagcagatccctgtataaagaaagaagaaaatagaagctgtgaatcagagcgcacagaacacagccattccccgggtgacagtagtgcacccatccagaacactgattgctgtcattcaagtgaaagggatggaggtcagaaagggtgcatagaaagcagctcagtatttgatgcagatactctgctctacaggggaactttgaaatgtaatcatagttccaaaaccacttccctagaacagtgtaatatagttcagcctcctcctccttgtaaaatagaaaattccatacctaatcccaatgggactgaaagtgggacttatttcacaagtttccagctgcctttaccaaggatcaaagaatcagaaactaggcagcatagttcagggcaagaaaacactgtaaaaaatccaacccatgtcccaaaagagaattttaggaaacattcacagccccggtcatttgatttgaagacttacaaacctatgggatttgaatcttcatttctgaaatttattcaggaaagtgaagagaaagaagatgattttgatgattgggagccttcagagcacttaacattaagtaattcttcacagtccagtaatgatttaacagggaatgttgtggcaaataatatggtgaatgacagtgaacctgaagttgacatacctcattcttccagtgactctacaattcatgagaacctgactgcaatcccacctttaatagtagctgaaacaacaacagttccttccttggaaaacctgagggttgtattggacaaagcattaacagactgtggagagcttgccttaaaacagcttcattatcttcggccagtggtggttcttgaaagatctaagttttccacaccaattttagacttatttccaacaaaaaagacagatgagctttgtgtaggaagttcataagtagcaattttgttttagtaacagactggctccaacactgcaacatggggacatttgccaactcgaacaaaggctgagaagcagccacaccgttgtttagggtagaataggctgtgtatttacatgaatgtataatatctatgtcagcagtattggctgagtccattagctctccagttggtttaatgattgggtttatttttgtttgtttgtttattaaaaaaatggaactgtacacttgtttggtgctaattaatacatcaaaatatactggggcttcctttttcaaattaagtgtgcatgattgtatatggaacaaatactaaggtcccagggtgggagggctagggaaagggatatggagttcttacttgacttgaatgtgcacctgagggtgctttgtgtaatatattgtacactacagcatcttatattttttgagttgagtttcaataaattacaatttttcacc

SEQ ID NO: 249 - DNA, 2095 bp, Homo sapiens
ggatgaaagtgatttaattcatttttagaattttttttttgttttgttttagcaacatgctgaacaactaatttactttaaaaataagccagttaaaacaaaggacgctaagcccaagtggggggcaatattagtcaggatctttggggtctaattccagaccaactttcagaagcacttctttgtctctgttctcacctctgctgtccctctcttccctcatcccctaagagagacaaagataaaagcccacctgcatccctaagtcttactgagatcagccaccccaggggagagaaactggatctacttacagccaccccctgtttccatccatatacttacttcccccaatttgcatgtgattatggaaacaagtcatgctcatgaaagcaactgtaaaataaaaggttatggagtagttcagcaacttcttcacagccagctttgtggagctggggaggacttagggcccattggagtctcttatgtgtacagcttcagggctgtccctttcagtttgattttaagcaatgcctcacttcatagcttagggggtaaggattccattcaggtaggttgtctaaaggaactaatgggacctctcagtgaattagctgaccagattttaggaaatctttttaatttctatgattttccttctcacattttgaaatggtaaaattgactggaaataatttttcttggtgccttattggttttccttgcaaacctttctcatattttctcatgaccattgccagtgaccaaggcccatgtgtgtgttgtgtgtaattgtgggcatgtacaagcttaaataacgtgccgacagcactgtttcaaagttggtattcattaggctgttgcctcctgggctggagctgcgctaatcctgacaccggctgccaggagaaaacctcatggatcacacaccaaaccttaataacagcatccgtgacctgcactctccagtacagaatgggaaccccagagctaggaaatgtagttgtatattttaatgaactgctaccccagccaaagaagcttctttcacttttgtgctctacagaaagcccaaggggggtaggagggacagagctttgaataactgctttctaacactaaatgtggccaacaggacagagcacatcacacgtataggcaggtgtgagggacagtggctaagaattgcctgctccctctgcatgctctttcttgtttccaaagtccaatcaagtgatcctgggaaacaaatctgtctggattgcggagggtggttctgaaagaactgccaagacgttaaagaagggtgaagagtaggcagaatataagtagctaacctgagtcaagactctcaaaagctagcagcctgatgacaataggatttatttcagccaggatagtgtctgtctgtgagtgcatcattttaagacagtatgacttcatgttgttacaaactatgtatagtatgtatgttttgtgggttgtatatatacataatatatattatatatatatatgagagatttggtgacttttgatacgggtttggtgcaggtgaatttattactgagccaaatgaggcacataccgagtcagtagttgaagtccagggcattcgatactgtttatgatttccatatatgtatagtgcctatcccatgctgtagtcactgttatgttaaatccagaagttacactagagccagcgatactttatttgtagacaatcaatttgaatccatatgttattactggcagatgatacatgattacagttctgaatctgtaacacttacaaaaggaaacccagagcagcttgatgagtttttgtttctgcttcgttcctgggagtcagtagaaacagcagttgtatgtggttatgttagtctcaagatacttaatttgttgaccttacttcagaaaaattttgtatgtattatatttgtgggaaggtaaaataatcatttgagatttttatcaaatatgaagattagttatttatgaaaaacaaagaaatgtctatttttctttgttcccaattaatgtagataaattttaaaatgcattaaagtaatggtccggaaaaaaaaaa

SEQ ID NO: 250 - DNA, 5287 bp, Homo sapiens
  ITSN; SH3D1A; SH3P17; MGC134948; MGC134949
gcgtccctcccagcggcgcgtgagcggcactgatttgtccctggggcggcagcgcggacccgcccggagatgaggcgtcgattagcaaggtaaaagtaacagaaccatggctcagtttccaacaccttttggtggcagcctggatatctgggccataactgtagaggaaagagcgaagcatgatcagcagttccatagtttaaagccaatatctggattcattactggtgatcaagctagaaactttttttttcaatctgggttacctcaacctgttttagcacagatatgggcactagctgacatgaataatgatggaagaatggatcaagtggagttttccatagctatgaaacttatcaaactgaagctacaaggatatcagctaccctctgcacttccccctgtcatgaaacagcaaccagttgctatttctagcgcaccaccatttggtatgggaggtatcgccagcatgccaccgcttacagctgttgctccagtgccaatgggatccattccagttgttggaatgtctccaaccctagtatcttctgttcccacagcagctgtgccccccctggctaacggggctccccctgttatacaacctctgcctgcatttgctcatcctgcagccacattgccaaagagttcttcctttagtagatctggtccagggtcacaactaaacactaaattacaaaaggcacagtcatttgatgtggccagtgtcccaccagtggcagagtgggctgttcctcagtcatcaaggctgaaatacaggcaattattcaatagtcatgacaaaactatgagtggacacttaacaggtccccaagcaagaactattcttatgcagtcaagtttaccacaggctcagctggcttcaatatggaatctttctgacattgatcaagatggaaaacttacagcagaggaatttatcctggcaatgcacctcattgatgtagctatgtctggccaaccactgccacctgtcctgcctccagaatacattccaccttcttttagaagagttcgatctggcagtggtatatctgtcataagctcaacatctgtagatcagaggctaccagaggaaccagttttagaagatgaacaacaacaattagaaaagaaattacctgtaacgtttgaagataaaaagcgggagaactttgaacgtggcaacctggaactggagaaacgaaggcaagctctcctggaacagcagcgcaaggagcaggagcgcctggcccagctggagcgggcggagcaggagaggaaggagcgtgagcgccaggagcaagagcgcaaaagacaactggaactggagaagcaactggaaaagcagcgggagctagaacggcagagagaggaggagaggaggaaagaaattgagaggcgagaggctgcaaaacgggaacttgaaaggcaacgacaacttgagtgggaacggaatcgaaggcaagaactactaaatcaaagaaacaaagaacaagaggacatagttgtactgaaagcaaagaaaaagactttggaatttgaattagaagctctaaatgataaaaagcatcaactagaagggaaacttcaagatatcagatgtcgattgaccacccaaaggcaagaaattgagagcacaaacaaatctagagagttgagaattgccgaaatcacccatctacagcaacaattacaggaatctcagcaaatgcttggaagacttattccagaaaaacagatactcaatgaccaattaaaacaagttcagcagaacagtttgcacagagattcacttgttacacttaaaagagccttagaagcaaaagaactagctcggcagcacctacgagaccaactggatgaagtggagaaagaaactagatcaaaactacaggagattgatattttcaataatcagctgaaggaactaagagaaatacacaataagcaacaactccagaagcaaaagtccatggaggctgaacgactgaaacagaaagaacaagaacgaaagatcatagaattagaaaaacaaaaagaagaagcccaaagacgagctcaggaaagggacaagcagtggctggagcatgtgcagcaggaggacgagcatcagagaccaagaaaactccacgaagaggaaaaactgaaaagggaggagagtgtcaaaaagaaggatggcgaggaaaaaggcaaacaggaagcacaagacaagctgggtcggcttttccatcaacaccaagaaccagctaagccagctgtccaggcaccctggtccactgcagaaaaaggtccacttaccatttctgcacaggaaaatgtaaaagtggtgtattaccgggcactgtacccctttgaatccagaagccatgatgaaatcactatccagccaggagacatagtcatggttaaaggggaatgggtggatgaaagccaaactggagaacccggctggcttggaggagaattaaaaggaaagacagggtggttccctgcaaactatgcagagaaaatcccagaaaatgaggttcccgctccagtgaaaccagtgactgattcaacatctgcccctgcccccaaactggccttgcgtgagacccccgcccctttggcagtaacctcttcagagccctccacgacccctaataactgggccgacttcagctccacgtggcccaccagcacgaatgagaaaccagaaacggataactgggatgcatgggcagcccagccctctctcaccgttccaagtgccggccagttaaggcagaggtccgcctttactccagccacggccactggctcctccccgtctcctgtgctaggccagggtgaaaaggtggaggggctacaagctcaagccctatatccttggagagccaaaaaagacaaccacttaaattttaacaaaaatgatgtcatcaccgtcctggaacagcaagacatgtggtggtttggagaagttcaaggtcagaagggttggttccccaagtcttacgtgaaactcatttcagggcccataaggaagtctacaagcatggattctggttcttcagagagtcctgctagtctaaagcgagtagcctctccagcagccaagccggtcgtttcgggagaagaatttattgccatgtacacttacgagagttctgagcaaggagatttaacctttcagcaaggggatgtgattttggttaccaagaaagatggtgactggtggacaggaacagtgggcgacaaggccggagtcttcccttctaactatgtgaggcttaaagattcagagggctctggaactgctgggaaaacagggagtttaggaaaaaaacctgaaattgcccaggttattgcctcatacaccgccaccggccccgagcagctcactctcgcccctggtcagctgattttgatccgaaaaaagaacccaggtggatggtgggaaggagagctgcaagcacgtgggaaaaagcgccagataggctggttcccagctaattatgtaaagcttctaaaccctgggacgagcaaaatcactccaacagagccacctaagtcaacagcattagcggcagtgtgccaggtgattgggatgtacgactacaccgcgcagaatgacgatgagctggccttcaacaagggccagatcatcaacgtcctcaacaaggaggaccctgactggtggaaaggagaagtcaatggacaagtggggctcttcccatccaattatgtgaagctgaccacagacatggacccaagccagcaatgaatcatatgttgtccatccccccctcaggcttgaaagtcctcaaagagacccactatcccatatcactgcccagagggatgatgggagatgcagccttgatcatgtgacttccagcatgatcacctactgccttctgagtagaagaactcactgcagagcagtttacctcattttaccttagttgcatgtgatcgcaatgtttgagttattacttgcagagataggagcaaaaattacaaaaacacacagggtagtgggtccttttgtggctttcctagttactcaaattgactttcccccacctttgcacaggtgctttcaataggttttaaaattatttttaaatatatattttagctttttaataaacaaaataaataaatgacttctttgctattttggttttgcaaaaagacccactatcaaggaatgctgcatgtgctattaaaaattgttccaaatgtccataaatctgagacttgatgtattttttcattttgtccagtgttaccaactaaattgtgcagtttggggcttttcccccttaccatagaagtgcagaggagttcagtatctctgttttaaagacgtatagaatgagcccaattaaagcgaaggtgtttgtgcttgtttgtgtgtatcagctgtaccttgttgagcatgtaatacatcctgtacataagaaattagttctttccatggcaaagctattaccttgtacgatgctctaatcatattgcatttaattttattttgcacagtgaccttgtagccacatgagaaagcactctgtgtttttgttcggtctcagatttatctggttgagttggtgttttgtttggggtttttaattttgcgtgtttgcatagcataaaatcagtagacaacaccactgaggtcgttacgatcaacgatatccacagtctctttttagtctctgttacatgaagttttattccagttacttttcatggaatgacctattttgaacaagtaattttcttgacaagaaagaatgtatagaagtctccctgcaattaatttccaatgtttacattttttaactagactgtggaatttctacagattaatatgaaatggagctcatggtccgtttgtgtggtaaaaatgctgtagctgaagccctgtttgtcttttaaacactagttggaagctctcaataaaaatgcctgctgctcacagcacagaaaatggggcagggggagcctcaagcacaatctagctgtcctcctaaagactctgtaatgctcactcccctcgcgttctcccggcgctgtcgggaggctgtgctggtggtcgtgtagaggtccttctcctttcacatggtgcagagagcgaggacctctcctcctcgttcagttgcacttcagtattttcacggatatgaatgtaaaatatataaatatataaacctgcggctttaacaactgtaatacaaccttttgaattaattccgtgtatagataattaaattcttcatacaaaaaaaaaaaaaaa

SEQ ID NO: 251 - DNA, 72930 bp, Homo sapiens
gatccaatccactgtttgctatctcagtggccttgggtaagtcacttcacctctctgggccttaatttcatctgccaagtgggagttatgatgatagtacttccctcataaatcactgtggggggccgggtgaggtggctcacacctgtaattccagcactttgggaggccaaggcaggcagatcacctgaggtcaggattttaacaccaggctggcaacatggtgaaaccctgtctctacaaaaatacaaaaatgagccggacatgatggcgagtgcctgtaatcccagctgctagggaggctgaggtggaagaatcacttgaacgcagaaggcggaggttgcagtgagccgagattgcgccactgcacttcagcctgggcaagagagcaagattctgtctcaaaaaaaaaaaaaaatcactgtgaggataacagatgtatgtagcatttaatacggtgttttgcacaagtaaatgtatacaactttttttttctttgagacggaatctcgctctattgcccaggctggagtgcagtgacagggtttcaccatgttggccaggctggtgtcaaactcctgacctcaagtgatccacccacctctgcctcccaaagtgctgggattacaggtgtgagccaccatgcccagccacttctcaacttatgtcccaataaacccatcatacgttgaaaatattgtgagcagaaaatgcatttgataaacctaacctaaccatcatagcttagcctagcctatcttaaacatgctcagaagacttgcactagccttcagttggacaaaattatataacacgaagcctatttttaaggtttccaaggatggacccaagcacccattccgaaacccctttccaggattactgcaaattcccgggaggctttatttctcctgctcccgttcctacttcagtctgtactatctttggtcagcactataccaaaacagatgtaaaagttggccccttcagctgtttccaccaacactccagtcagggcagcccccgtgaatatagatctttcttgaatatttccagggataggaggcagagacattcacatcatagctataaacctcagggtgaacaaaaacaaaaacaactcccagtttccaagacagccttttctactttcctccacagcccccggcctcagccacaagccagctcctgtctcctggtaaaggaaatttgcctttggctattcattccactctctcttcctaaggacctctcagatttctcttccaggcattatcccactgtgtgaagcctcagggttgggggcttggctttctctcctatctccccatcaccaccatcatcaagtgaaagccttacagggctcctctttggccttcatgtagtccgcacaaggataggaggaaacatttgctgtcattctggccctctctggcttcctgctgtccacccctccccagaaccctcgggtcctgcccatttcccaaatccagtcctccagattctggtagaatctctgagccctcagtagcttctcagtgtatgtatgaccttttgcttaaaacattcagagccactggggaacatatccaaatctaagttctcttcttcttcttcttcttcttcttttttgaggcggagtctcactctgtcacccaggctggagtgcaatggcgtggtcttggctcactgcaacctctgcctcccaggttcaagcgatattcctgtctcagcctcccgagtagctgggactacaggcgcgtgccaccacccctggctaatttttgtatttttagtagagatggggtttcactatgttggccaggctagtctcaaactcctgacctcgtgatccgcccgcctcggcctcccaaagtactgggattacaggtgtgagccaccatgcctggccttctcttctttgttgcctccacaacagctgcctctcagacattcaagacctttaccctggttttccaaagcattttcctaatgaaagccatcctcttctctaagggtggaggtaatgcgctaagggtttatgacatgcatctggctcacggctgtttttaaaaaatcaaatcaacatttaaaaattgatggattacacataaaagtccggatttgtggcttttcttataaattcagaaaatctggcatcataagacccacatttctcccaaggagcatattggcctaaatgaagagcggactccctgccctttagacaggtttttcctttcttttttctttctaaatactgtacttcatgccataagacaggtttttctttttcttttttttttctgtgacggagtctcgctctgtcgcccaggctggagtgcagaggtgcaatctgggttcactgcaacctccacctcccgggttcacgccattctcctgcctcagcctcccgagtagctgggactacaggcgcccgccaccatgcccggctaattgtgtgtgtgtgtgtgtgtgtgtgtgtgtgtgtgtgtgtgtgtgtgtttagtagagacggggtttcaccgtgttggccagaatggtctcgatctcctgacctcgtgatccgcccacctcggcctcccaaagtgctgggattacaggcgtgagccaccgcgcccggcaagacaggtttttcttatgcccctgatacaccagccgtatttctctctcctgcttgacttctgcaggctttcacctttgtgacctttgctaagcggcattttagtgccagtttctaccctctgttgctttattataattaagtagggtctaggaattcgctaggttcacaaagggggaaaggggaccctacagcaagagcagtcgcaagtatgcaagtgatggctatccctggaagggccccgggtccagagggatggggtctcccgtgcaaggaggcggtgggactggtgagggtgaaggtgagtcttagttatgaaggatctaaatgctctctcatcgggcacggggagccagtgtggggtttaaggcagggcgacacaccatgagctgtaggtatgagaaaggtggctgggaagcttgcggggcagaatctattgaaaccctcccgctcaaaaaaaaaaacctctttaaaaataaaacaaaaacccctctccctctccctctccctctccctctccctctccacggtctccttccacggtctccctctgatgcggagccaaagctggacggtactgctgccatctcggctcactgcaacctcccggtctgattctcctgcctcagcctgccgagtgcctgtgattgcaggcgcgcgccgccacgcctgactggttttcgtttttttttggtggagacggggtttcgctgtgttggccgggctggtctccagctcctaaccgcgagtgatccgccagcctcggcctcccgaggtgccgggattgcagacggagtctggttcactcagtgctcaatggtgcccaggctggagtgcagtggtgtgatctcagctctctacaacctacacctcccagccgcctgccttggcctcccaaagtgccgagaatgcagcctctgcccggccgccaccccgtctgggaagtgaggagcgtctctgcctggccgcctatcgtctgggaggtgaggagcccctctgcctggctgcccagtctggaaagtgaggagcgtctctgcccggccgccatcccatctaggaagtgaggagcatctctgcctgacccgcccatcgtctgagtggggagcgcctctgccccgacgccctgtctgggacgtgaggagcgcctctgctgggccgcaccccgtctgggaggtgaggagcgtctctgcccggccgccccgtctgagaagtgaggaaaccctctgcctggcaaccgccccgtctgagaagtgaggagcccctccgtccggcagccaccccgtctgggaagtgaggagcgtctccgcccggcagccaccccgtccgggagggaggtgggggggggtcagccccccgcccggccagccgccccgtccgggaggtgaggggctcctgtgcccggccgcccctactgggaagtgaggagcccctctgcccagccagtcgccccgtccaggagggaggtgggggggtcagccccccgcccggccagccgcccagtccgggagagaggtggggggtcagccccccgcccagccagccgccccgtccgggaggggggagggggggtcagccccctgcccggccaggctccccgtccgggagggaggtggggggatcagccccccgcctggccagccgccccgtccgggaggtgaggggcgcctctgcccggccgcccctactgggaagtgaggacccctctgcccggccagccgccccgtccgggagggaggtgggggggtcagccccccgcccggccagccgcccagtccgggagggaggtggggggtcagccccccgcccggccagccgccccgtccgggagggaggtggggggatcagccccccgcctggccagccgccccgtccgggaggtgaggggcgcctctgcccggccgcccctactgggaagtgaggagcccctctgcccggccagccgccccgtccgggagggaggtgggggggtcagccccccgcctggccagccgccccgtccgggaggtgaggggcgcctctgcccggctgcccctattgggaagtgaggagcccttttgcccggccagccgccccgtccgggagggaggcgggggggggggttggccagccgccccgtccgggagggaggtgggggggtcagccccccgcccggccagccgccctatccaggaggtgaggggcgcctctgcccggccgcccctactgggaagtgaggagcccctctgcctggccagccgccccgtccgggagggtggtgggggggtcagccccccgcccggccagacgccccatccgggaggtgaggggcgcttctgcccggccgcccctactgggaagtgaggagcccctctgcccggccacgaccccgtctgggaggtgtgcccagcggctcattggagatgggccatggtgacaatggcggttttgtggaatagaaaggcgggaagggtggggaaaaaattgagaaatcggatgggtgccgggtctgtgtggatagaagtagacatgggagacttttcattttgttctgtactaagaaaaattcttctgccttgggatcctgttgatctgtgaccttatccccaaccctgtgctctctgaaacatgtgctgtgtccactcagggttaaatggattaagggcggtgcaagatgtgctttgttaaaccgatgcttgaaggcagcatgctcgttaagagtcatcaccactccctaatcttaagtacccagggacacaaacactgcggaaggccgcagggtcctctacctaggaaaaccagagacctttgttcacttgtttatctgctgaccttccctccactattgtcctatgaccctgccaaatccccctctgcgagaaacacccaagaatgatcaataaaaaaaaaaaataaataaataaataaaaattaaaaaaaaaaaaaaaaaaagaaaccctcccatcccccgctgtgtctgctggaagcccagtgagaggcaggggcagtggtccgaggacggctgccgccggatgagtggcaaaggcggtgggaacggctgggaggactgcaagggagggatttcggaggcagccttgtcaaagagtgggtatgcttgaccttgacagaaaacactgcgggagctgcggcagcaactcgctcgcctccgctcccttcccgtcccctgcgccgtagcggaccgcggcggaatcccggcccctcgccgggcgctctcccgcgcggatgcggcacgcgaggggcgggggcgggatggcgagggtggcggcactgcggggatgccggtcttccctggaaggccagggagggaaagggaggctggtcacatggcaccgccaccgggcgcagccggattggcgggttgcgcagccaagcaagccaaggctgctcggatttccaggcactaagcggccccctcccctcgttcgagtgcccaaggaaagcgctggccctgccccgggcaagggaagacgcgagccgtgctcgttccgcagtgtgaaacgcacggtatcgccgcagtcctagggaggtctgattattgggagcttgggacgtctgattattgtgtgggagcaattgtctgattattgtctcgggaggtctgattattgtctgggaggtctgattattgtctccatgaacacctctcgtcccccttcccttctctgcttttctcctgacttcccacacctgcccctctttctaccttacctacctggaggccagctttatttgcaggtttccattacttgctgtaatttttcagctttgagtaaatcaacctgctggaggtggcaaagattaaaagagaaatccgacagatgcctcaagtcccacacatccagccccacttatctccccaaaatgctcttctctgtctcaagcaaaaacctgagaaccatctccatctcgctgtccccaatcaaatctatgaccaaaacctattaaatttacctccaaaatatttcttacacctcacaccaagtatttttccttcttagcatctatcctgatttgtaactgtatgtttatttgtatgattgtttttgtaagggtttttcccactggattgtaagctccatgtgagcagtgaccttgtctgttttgctcattgctatatcaccgacactgtaccaggcacatagtaggtacacactaaatgttaattaattgattgaatgaatgaatccatgtaaaacaagtcctggggaggggcacagattttaagtaaaatacacagtttatctatccccaagaagtcacctatctgatgggtttggtgtcatgaagcctgtagttccagctacttggaagactaaggcaggaggattgcttgagcccaggagtttgaaactgtatcatactatgattttgcctgtaaatagccactgcactccagcctgggcaacatagcatgacaccgtctataaacaaaacaaaaaaagaagtcatctatccaacaaacatgtcctgaggtctttgctacacaaggccctggacagagaccagtgcatgcaatgagtaagtttccatttctaccttccctctttgtcttaagagtccacatgtcactaacccagacaagaccctgtggtattggaggtgccaaggatggagtcagagtccaggatttagaatatgatgagctggctgtgtgaccacaagtctcctctctctgaggctccatcttctcatcttgaaaacaggatagcaataccaagctcacatggctgttgagagcaatgaatgagataaatgaaagcatcaactgcgggttttacagcgatgttgggtgtaggtgggtgatcatatcttccagtttgcctggaacagatcaattgacacctgttaaactagagcaaattaatagcattccctttcatccctccaaatgtcctgctttggacagtaaagtatgtggataccctagtactacatgtaactctagagttatctacactgtaccctggggacacaaaggatggagggaggtgggtctgactgtagaaaggtggatggtaaccatggaaatgagcctgaaatatgcacaggattacaccaagtggagagggataggaagggcataagaagcagagggaccagcatttgccaagaagcgaggcttaacaatcctgggcatacttagttagataacataaagaaggccaaatggcttgagtccaggaggcatgcaagaagatgaggctttctgcagtgggaactggagaaagtttttgagtaggggtagacatgagccaatggcttcacaaaagagaccagttgaggagctggagccgaaattgaagcagaagagataatgaggcttgaacagggcagtgcatgtaaacccaggaacaaagggtgagattccataagcattttggagataaaacagataggacttcgatgtgagcatcagaggacaggtcagaggcaggaagacttccagatggataaagaggccactccctgaggcaggcagagagaggacaggccaggagacccagaaaataggaggtgacccagatcaggctgactaggcacagaagctcatgatccacagggaaaaatggagatcacatcaggtagaggtgacttctgaggccagaggaaggagctaggagcctcaatattcatgtgacatctaattaaaattagctttcaaagcaaccttgaagccaggtgctgtggctcatgcctgtaatcccagcactttgggaggctggggcgggtagatcacctgagatcaggagtttgagaccagcctggtcaacatggtgaaaccccgtctctactaaaaatgcaaaaattagccaggcatggtggcacacacctgtagtcccagcttcttgggaggctgaggcaggagaatctcttgaatctgggaggcagaggttgcagtgagctgagattgcgccattgcactccgtcaaaagcgaaaaagtgaaactccatgtcaaaaaaaaaaaaaaaaaaaagaggctgggcgtggtagctcacacctgtaatcccagcactttgggaggccgaggtgggcagatcacttgaggtcaggagttcaagaccagcctggccaacatggcgaaaccccatctctactaaaatacaaaaaaaaaaatcagccgggcatggtgattagtgcctgtagtcccagctacacgggaggatgaggcacaagaatcgcttgaacccaggaggtggaggttgcagtgagccgagatcgcgccattgcactccagcctgggtgacagagcaagactctgtctcaaaaaaacaaacaaacaaaacaacaacaacaaaaaaccaaaacaacaacaaaaaccttgaaaaagacaagagaaaactcaaaagtagagcctcaagaaagaaaaaagcaggttttgtagtccaatttcatggtatgtatggctctccttgatttaaactgtcccataatacctcatagactaaaggctgagctccttagcctggcactgaaggcttcctgtagctgggtctcagcctatctctgatgaacatttcatatttcatctgctcatgtttggcccctccctccttccttgtgaaagagtagctccttccttttggagaattgctcctccctttggtccagccatatggttcaggtactgcctatcaatcatagcattccatcctccatgaccacagatgtgggtatgcagccaaacctcaccaatcagacttgttctgaagaattttgagaatctggaacaaagggaagataattactcctctctggtgaggaagctaggacacataagctagggattctacagttccagcaagagagagaagtagactgaaaaaataaagtgggaagaagagggagttaatgcttaatggctatggaattccaagttggtaaaacgaaaaagttctggagatggatggtggtgatggttgcacaacaatatgaatttatttaatgttaccaaactgtacacttaaaattggttaaaatggtagattttatgtaatgcatattttaccacaataaaaaaaaaagaagaagctagcatgcagagaagcaaagatgaatgatggagtgcaggatctgggggctttcctgggtgcagttgctgtggtacaaagggttcaaaaggttatagaagccaaaaatcactcctttggcctagcctcattcaagttaggcttctggtccttgcatccaatggagccataatacagaacctttccattttcttttttgtttcttttcttttcttttttttttttttttttttttgagaagcagtctcacactgtggcccaggcttacagtacagtgacatgatcttggctcactgcaacttctgcctcccaggttcaagtgattctcgtgccttggcttcccgagtagctgggactacaggtgagtgccaccatgcctggctaatttttgtatttttagtagagacagggtttctgcatgttggccaggctggtctcgaacctcccgacctcaagcaatctgcccacctcagcctcccaaagtgctgggattacagcgtgagccaccatgcctggccagaacctttccattttcatttctcactcatgtcctttcaaacattctcttctcctgtcaaccctgctgctcatacttcctcagacttatcctgtgtttatacacactatgcctttcctccctgctccccaagcttggaatgtccttcccccttcttatgactttgtcaactcatattcatcatttgagatccagctgaaagggctcctcctcaggaaagccatccctgaccaccctaagcagagcctgccatgccttctgttggtctgtcatagcttttttgtatatgtcctcatcacttggtatctcagtgatctgccatcttgtctgtaacccccagtagattatgtttttcatctccatgaccctggtagctagcaaagaggctagcacaagtaagtataataaatctttactgaatgagtgtacagatgagtgagaatctttttctccctcatgccatctctgagtcactactcagtttctatcaagaagagacacataaggaaacgtgggaggaattgctttagtccctttattcaagggtgatagtctcaggagagaagaaaacacaatcaagttggggccactgcaaagtctagtggcatttaagagaagttattttccccaaagcactggcagctttgaactgaggctgaatttgtttggaagccagagccaagacaagcagacatttggtagtgttgagccttccagcaagctgggattctgacagccgtttctgtcagctgcacaaggagaagcatctaaaaggcatctgggtctacctggaattgggggtccccatatcttttagcacaatctgacccaaggaacaaggcagccgtctctcctaccctccattcccaccataagcatatacctcctctaagggggctctgcagttgattaggacgttgggcactgagaacagagtcaaagatgactataggaaactgtggcagagatgatactactgcttactaaatggcttatggtttcttcctacatttcccagcctcccttgcagtttttttgtttgtttgtttgtttttgacacagagtcttgctctctcgcccaggctggagtgcagtggtgtaatctccgctcactgcaacctctacctcctgggttcaagcgattctcctgcctcagcctcctgaatagcagggattacaggcgccccaccacaccccgctaacttttgtatttttagagatggggtttcaccatgttggccaggctggtctcgaactcctgacctcaggtgatccacctgcctcggcctcccaaagtgctaggattacaggcatgagccaccgtgcctggcctccagctctctttttgaggcaatactgaaagctttgcattgagatagtggagcccaagagagaagtagtctggatctctgagttacccaggagagttgaggagagctactctggagagtgccttaacccacagccagcgttgcatgagtggaaaagatataccattgttgtgtgttatgccattgagaaatttggcttgtttgttaccatagccaagtctagcctattctgccagataaatatagacattaattgttgttttagccatccagcatcaaacctccttcctatttgaggattaaactctccccctcctttaggactctttggtgttgccaaatccagtggtcacatctctgttcttatctttcttgatttctcagcagcatttgtcacaattgaccactcccttctgggaacatactatgttggtgtctgtgacatcatgcctgcttagtttttcttttatgtcactggcccccgcttttcagttttctttgttggctccccttcttgttttatgtcaaaagtttgaagttctggagacctggtttaaaatatcacagctggtttccaccttttgagacgatgtctttttgtgtcacccaggctggagtgcagtggcataatcacggctcactgcagtctcaacctcccaggctcaagcattcctcccacctcagtctcccaagtagcggggactacaggcacactccatcacacccagataatttttgtattttttgtagagatggggttttgccatgttgctcaagctggtctcaaactcctgggcttaagagattcaccagcctaggtctcccaaagtgttgtaattacaggtgcgagccacagctcctggcccatcttaccattccttattaataacagagcactcattgttagctgggcacattgtacccagttaagagaatgtttcccaggctcccttgcagctgagtatggccatgtgagtgagtatgttttggcaaaaatgtgcgggactttcgaggcagtccttttttctttctttctttttctttttcttttttttttttttttgagacagagtctcgctctgtcgcccaggatggagtgcagcggcgcgatctcggctcactgcaacctccgcctcctgggttcacgccattctcctgcctcagcctctcgagttgctgggattacaggcgcccgccaccacgcccggctaattttttatatttttagtagagacgggatttcactgtgttagccaggatggtctccatctcctgacctcgtgatccgccagcctgggcctcccaaagtgctgggattacaggcgtgagcctccgcgcccagccccaaggcagtcttcttaaaaggaagaggatgcatctttcttccctttttccttcccactgtttggaatatggaccatagtgaggtgaccttaacactggaagccaaatactgaggatggctgaacagccctgaactgcctacttttggacttatatttcatggaaagagagaaatttctggctaggtgcagcggctcatgcctgtaatcccagcactttgagaggccaaggcaggaggatcgcttgagcccaggagctcgagaccagcctgagcaacacagggagatttcatctccatgaaaaaaataaaaataataggcaggcctggtggcgcacctgtgctcccagctactccagaggttggggtgggaggatcgcttaagcttgggaggttgaggcttcagtgagctgtgatcacgccactgcactccaacctgggtgacagagcaaaaccgtctcaggaaaaaaaataaataaatttcaatcgtaagctatttttttcttttgttatttgcaattgaatgtaatcctgatacattcctgttgttgaagctgtttgcctgcctcccactaggaagcctaagggtccagatcctcccccagtcagaggaatggggaactagaaaaagaaaggcaaaggcactgccaggcaagaaaacgctgggtctccttccacaagtttggtaagtaagcaagataccaggaggatagaatggtaagtgagcctagaaatagactattatatacatagggtttattaaatacatagagaacactgaatgctagactaagaaatttggactttattctggaagtcccttgcaataggggaccttgtctgttttattttctaatgcctcgcactttgtagaagctcagtgaatgaatatattctttattaatttatgccgtctgcttaataaacagaaatgttggaaggtgaaccagttgggagtcaccatctgatcaacccctgcctgctttttataaataatgtaactgaaccatcatttactggaagtggcaatcaacctgtgaggaacggcaaaccaaaaagtccaccttgggtgtcatggtgatggaattggaggcggagaccagggagagcagcgggctaggatctctgagagtctccgcaacatggcggccctggaaccacctgaccggcaggaggcggagctccgccccagctcgctcggccccaccccgctcggccctgcccagcgcactcctagaccggggcgcaagggttgtgaggtgtttgagcgaagcgcctgcgcagggcagcggcgcgcggggcggaggctttataatcacttcgtcgttgccgctcggcttctatcgccgggagggcggttgaggcggtggtggcggcgtcggcggcggccgggcgctggctgaggggcgctgaggcgggagctgtggcggcgctgggcgcccctggctcctcggcctctgccggccatgggctccgagaaggactccgagtcgccgcgctccacatcgctacatgcggccgcacccgaccctaagtgccgcagcggcggccggcgccggcgcctcaccttgcacagcgtcttctctgcctcggcccgcggccgccgcgcccgggccaagccgcaggccgagccgccgcccccggctgcgcagccgccgcccgccccggcccctgccgcggcccagggcccgccgcccgaggcgctgcccgccgagccggccgccgaggccgaggcggaggccgcggcggcggcggcggagcctgggttcgacgatgaggaggcggcggagggcggtggcccgggcgcggaggaggtggagtgtccgctgtgcctggtgcggctgccgcctgagcgggccccgcgcctcctcagctgtccgcaccgctcgtgccgggactgcctccgccactacctgcgcctggagataagcgagagcagggtgcccatcagctgccccgagtgcagcgagcgactcaacccgcacgacatccgcttgctgctcgccgacccgccgcttatgcacaagtacgaggagttcatgctgcgccgctacctagcctcggaccccgactgccgctggtgcccggccccggactgcgggtgagcgcgggggcgtggcgcgggtggcggcgggctgcagccgaggggcgtggctgggggcagcagggaccccgcgtgggtgtcccaagcagggaaacccgcaaggcggcagcttcggcggggtggtaaccatcaggcaagcccagactagtggtgtgaacgcacccgacaccccgccccctgccccagggctcgaggtggctgctaagcattcggtgaggggaagggagctgtccaagttaggagacagggagaggcggtttttttgttgggggaatgccctctgtccggaggtgaggacagtatctttttttttttttctttttttttttggagacggagtctcgccctgccgcccaggctggagtgcaatggcgcgatctcggctcactgcaacctccgcctctcaggttcaagcgattctcctgcctcagcctcccgagtagctgggattacaggcgcccgccaccacacccggctaatttctttgtatttttagtagagatggggtttcaccatgttggctaggctggtctcgaactcctgacctcaggtgatcctcctgcctcggcctcccaaagtgctgggattacaggcgtgagccaccgctcccggccaaggtggggagtatctcttaatgagagtggggaggggatatttggccaaggagggaatgagaatattctgagggggcagcgcgtcggaggggtgtgtccacttggctagggacagacttagcattgcagaagaaggcgtgttctccctgacaaccaccgctgaaagttgggatggaggtgactggggaataggctctcgggtaccctgagcactatgtgttctgtgccacgctatcgggaggcactctgtcgttcttaccttgctgccttgggtagggtgaggggtagacagatatgttctttgtccagagtctcaatgggggcactgagaagaatgcccagaggttggtgtgataggagaaattgtgtttctgaacccctttgatcttgagttcttgatgacagtctttttaatgcaccatgtaggctgaattttaaagggcagtaaattaaaatatgcaatatctgcagagacataatacaccagattttgctatctgaagcattcagtggagaccttcctcgccctccccgcctttagaagtctaattgttactgtcagtatatcccatgaaggggttgcacgcaggaagaggggctcatttaagtagttgggagtcagacagccattacctgttctgtgaccttgggcagataattttattcttgtgtgtcatgttttggcgacaaaaagatgctggggagtccttgcagtgtgtaaacgtaatgctagtaaaaagttgtgtgatctttagcttcaaaggagttaaggacttttaattgtagcctatatatcaaggtggttttgaaatctccatgatgctgctggttgtctcctttcaaaaggagctgtcttagagtgtctaggagagtaagaagagttaacttctgtttttaattctgccaaacttgtttagaaatgggtgtgctatttaacctcactgagatggggtttctaaattactttgaagtgttgtggtcaaaggaatggtgtttatggtggctcactttcactttcagttaataagtatcaggaaggaccttttaggttcatggaactgtctatgtctagtgatcttactggccctctgaggttaatttatattaaagttttacagatactgttgatctgttttcttaaccaaacgaatattaagagaacacaggccaggctcggtggctcacgcctatagtcctagcattctgggagaccaaggtgggtggatcacctgaggtcgggagctcaagaccagcctggccaacatagtggtatcctgtctctgctaaaaatagaaaaattagccgggcatggtggtgcacacctgtagtcccagctacccaggaggctgaggcagaatcgcttgaacctgtgaggcagaggtgcagtgagccgagatcaggccactatactccagcctgggtgacagagcgagattctgtctcaagaaaaaaaaaaaacaaaacactgcatagttaattttggaatagtacattaactcctttctgagatgtttccttgagttctaagaaatgtggcagatcatctttctggaaaaggtccctgtttgtttttttatttttctaaagtcagtttctgtctttgctcacatcaataaaaatgcacagaaaataattttcaagcttggtgacaactctcaactatttggaagttattaaaaaattaggccatttcttattttagccaagtattatgttagtatcctccagattttatttttttaattagttagaagaatgataatcatatatatagttatatatataaacaatgtatttttttatatgtgtcatctacggacttaaggtggagtttggggaaagaagaaagctggcctctcaatacctgtgtgccaggtatatataatttaattcgatacaaccttgtgagataggtttaggtttgatatagttttataaatgaggaaactaaagtttaaggaaattgaatgacttgttcagggtcatataactagtaagtggtggaaccaggcttagaacaggggtcttaattccaaccaatgccaatattccttccattcagcccctgttttaaaaagcatttgcttgtcaacatagccgcattattgaggatgctgctgcttgggtgcatttcattaagtgtagcctgaggacaacatggagaaagccaaagatactagagtctagtttcctttctgattcctgttgttaacagcctcctacctacgttatttttcttatctgaaataggtctaattctttcctgacttgagaggtttaattaatgtttacacggtgttttgagatcttcagttgaaagtggttatagggagtaactttaaaattctgttagttgccaaatagatgcctgagttctcccttgggatgtgcctagtggctttgcatctctttttttttgagacagcgtctcgctctgtcacccaagctggagtgcagcagtggtgcaatcacggctcactgcagcctcaatctcctgggctcaggcgatcctcctgcctcagcatctcaagtagctgggaacacgggtgcatgccaccaagcccagctaattattattattaatattattattattatttgtagagatagggtctccctgtgttgcccaggctggtctcgaactcctgggctcaagctgttttcccgccttggcctcccaaagtgctgggattattgctgcctctttttaatgccaggaaaaaaaatagcttctgtgttcttactggatgtcatggttcccttgttttgttttgaacagtgttgttttgttttgttttagagacagagtctcactctgtgcccaggctggagtgcagtggcatgatcatggcttactacaaccttgaactccttgactaaagcagtactcccacctcagcctcctgagtaactgggattataggcacgaaccactgcacactgctcctttgttttatttttttaaacaaatcgttctattcttctggggctggtagaggtcattgataaacactagaagagaagtccaagtcccagttacctcctattcccatacctgaccatctttactgcccacagataaagttcttgccagccaaattgatcaggtctcccctctgccttgtttgtatgtgcatttggtagggtgaggggggcatgtgagcaatcttacaggttctgatcattagttttactataattactcataataacaagaacaccatacattcagagattcatgatttgtttacagaatatttgtaggatagagcaaagagttttggatttttcttctcttacactcaaatatggttttattttattcataaataagggaaccaatttcagtgggaaaacattcacattataatttttttttttttgagacggagtctcgctctgtcacccaggctggagtgcagtggcaccatctctgctcagtgcaagctctgcctgccgggttcacgccattctcctgcctcagcctcctgagtagctgggaccacaggcgcccaccaccacgcctggttaattttttttttttttttttttgtatttttagtagagacggggtttcaccgtgttagctaggatggtctcgatctcctgacctcgtgatctgcccacctcggcctcccaaagtgctgggattacaggcgtgagccactgtgcccggcctcacattattatttaatatactaagaacaatatggcctagtataatcttaaaacaagctgtcaaatgagataaaattagttcaaaatacaaataactgattttttatagttctttatagtcttcagactataatctcattcagacataatttcattttagtctcatccaggtggatattggcgtgcattttataaaggagaaaccagttcagagaagtttaaacatggggcctagtgtttcattgctaataattggtacaattgatcttttacgcttttgagtctctgcccaagtatgtcttttcagaaaccccgaagtcaggtaactgtaatgttttcctctcaagtatcctgttgctaatcttaaaaccctttcagaatctctaggagactgacgggtgagcaaagtaggcaacagaaaatttcctggtgtacaggggcagatcttctgtacagatgaataagaagggataaggctgtcttgacctaaattctttgtgcaggtccaccactccagcctttcattgctgcctctgtcctctgcagaatccttcctcccacctgatcccaggaaacagtatcagctattggccttcccagacaactagactggaccatcccataaacaggaagcttttttcatccctagcacatttatgagggaagatcaagcaagctctttgagcaagacaaatttcagtcagtgaaggaggatttttgctttctgaagcctccctgaacctcttctcttgatttggctccatacctcctgttccacaacttttccctgcattccccaactccacaccaccccctcctcttgtgcacgtacaccaacctccatcccaatacatctgtctcagatttgccaaagtacttgtactaaaggagaacatctgtatcactcccctgcctaagactattcattgactacctaacctataagatgagttcttattatgtctttgagaacttatttgatctacccttatcatttaagctcctttacagtttccaaccatcttttttttttttttagatggagtctcgctctgttgcccaggcaggctggagtgcagtggtgcaatctcggctcactgcaagctccacctcccgggttcatgctattctcctgcctcagcctcctgagtagctgggactacaggcacctgcaaccatgcctggctaattttttgtatttttagcagagacggggttttaccgtgttagccaggatggtctcgatctcctgacctcgtgatccacccatctcagcctcccaaagtgctgggattacaggcgtgagccaccacgcccggccatctccaaccatcttttgattttattttctatttttcactcacatcactatttcctaaggtatgttataggcattacttgaaagaaaaatgttttgtgaggaaataagcttggaaaatactgagttaaacaaaataaaacaagtttatgagtttcttaaatctttaaacatgctaatatgctaatatgtagtataaatcttcaatataatgtaatttccccaatttagatcaccaggaaacaggtttttgttttttctgtagcatctttaaggcttaactcaaactttccctaaactcctttaatagttaccatgctggcctgcctttggttagtgtccttatttaaccataaaccttatgctctgaatagattgagagctcatgtctctagactaggatatctatattccaaccatttctacaactctgtgtacaaagtctttcaattaggctctagaagagtgtggtacatagatgaattttgatgaaaaagataagaaatatgagcagcatagttctcagaggaagaatagagatgaaagagataagcaagaatagtatagacaggtgatcattcaattcaacagacaacttttttttgagatggagtctcgctttgtcgcccaggctggagtgcagttgtgccatctcagctcactgcaacctctgcctctcgggttcaagcgattcttctgcctcagcctcccaagtatctgggattacaggcatgtgccacaatgtccagctaatgtttgtatttttagtagaaacagggtttcaccatgttggccaggctgggcttgaattcctgacttcaagcgagccacccgcctcaccctcccaaagtgctgggattacaggtgtgagccaccacacctggcttcaacagatactttcagaatgatacactgttgaaccctgggtgagtactgggtatttcaaaaagaacttagacatggttttcttgataggaagtttcacctggtagaggagacagataattgatacatagatagatagaaaattattcaaatgtcatatgataaatactaaagaaaatacgggtgctcttagatagatgaaagaacaatagaatttgcatgatggtttcaagaaagacttcacagaggagcaggcatggtggtgtgcacctgtggtcccagctgcttaggaggctgaggtgggaggattagttgagcccaggagttcgagaccagcctgggtaatagcaagaccccatacctgggaaatgactagagatcaacctgaaaacgtggactggattcaggttgataggcctgtgtaagccatggaaataagttttgggttgaagcactttttttcttttttctttttctttgaaggattttaagcaaaagagtaaccttccagaatggaatttggatggagtggggaatagggagagcagataaggaggctcttggagttgtctagcctagagatgggtcttaaatagggcaggaaaaatgaagatgttaagggtacagttcattgtgacaagttggcgcatgtctaccaccctgatgcctactaggggtctatttgtaaatgggtagcctagttatgttacatgacttggggatggaaagtacagacataatataggaacacatttctttaaccactgaagtctattggagcataatcaaatttatactaatggaaatctctttccagggctgaagctaagtaatgctgtggtctagcttgtcactttatgaagtttctgaagatttaggaaattaataaaatgagtaaaagttgtatgaacttaagcagcaggggctggggtgggcggtctgtagtctttttcttttttattattttttatttttttgagatagggtttaactctgtaactctgttgcccgtgctggagtgcagtggtgcaatttcagctcactagaacctcaacctcccaggctcaggtgatcctcccacctcagcctcctaagtagctgggactgcaggcatgtgccaccacacgccaccgcgccccaccacactcggctaatttttgttgttgttgttatttgaagagagagtctcactctgtcacccaggctggagtgcagtggtgcaatctcggctcacagcaacctctgcctcctggattcaagtgattctcctgcctcagcctcccgagtagctgggagtagctgggactacaagtgcacgccaccatgcccagctaatttttttgtatttttagtagagaggggttttgtcaggttggccaggctggtctcgaactcctgacctcaggtgatccacccacctcagcctcccaaagtgctgggattacaggcatgagccaccatgcccggcctaatttttgtgtctttcgtagagatgggatttcaccatgttgccctggctggtcttgaactcttgggttcaagtgatcctcctgcctttgcctgacaaagttctggggttatgggcatgagccactgcacccagctgtgtctgtattcttcacagcatgtaattttctacacctttcttttagcttctgattagcaagcctgactgattggttaagctaaaagagcagagtaggagagatgcaccagcatgggacgtggaagagaaggaacaaagtggacagggcagattgggtttcaaggatgaggtattttcttttcttttttttttttttttgagacagggtttagctctgtctcccaggctggagtgcagtggcacgatcttggctcactgcagcctccacctcccgggctgtagccgtcctcccacctcagcctcctgagtagctgggactacaggcatgcactacaggcatgcaccaccacgcctagctaatttttgtattttttttttttgtagagatggggttttgccatgttgcccagactggtctcgaactcctgagctcaagcaatccacccaccttggcttcccaaagtgctgggattacaggtgtgatccaccatgcccaggcgaggttttttttttccaactattcgggaagaagattaccgtattcagaacttaggggtttaccactaaagtgggtttatatgaaattttaggattaggttatagtacctggcatataataagccaatagatacatggatacattgaaaagattgctttagagcagagtgatggcctaggagaagacctagaatgtcctagggaaggtcaaacaaccaaaacaagagagggtctctgtcattcatgcaacacaggtattttgagcatgaaccagtatactagactgagattaaaaagtggatgatatgtctccttaagtccagtgtggtttggaaggcaagcatataaacagttagttacattataatgtaagtgttataaaataattgtgcacacccacgaagtaggcaacgagctgcctagagaggttaagtatattttacagagaaaatgacacctgagttggttcttaaatgggtacttgtcagggcaagaagtaaggacaagacatttctaggtagaaggaatagagtatgtaaaagccagaaagtaggacagagtgtacgatgtttttacgccatatatctttgaggacaaggtctcacatgcagttttagaacgtgtttagctacgtttgaatgtgacaagtacctatacctccatttggtggaatagaagctaaggtttggagattgtttttttttttttttgagatggaattcctcttttgttgcccaggctggagtgcagtggtgtggtcttggctcactgcaacctccgcctcccagtttcaagcaattctcctgcctcagcctcccgagtagctggattacaggcatgcgccaccatgcctggctaatttttgtatttttagttgagacgggatttcaccatgttggccaggctggtcttgaactcctgacctcaggtgatccacctgcctcggcctcccagagtgctgggattacaggcgtgagtgactgcaccaggccggtttggagattttaatagcttcatgtcatgcagcatgagtcagaggcaagagctcagaccaggtacccaaaaacaggaatgccaaatctcgtgccctgagtaattctgtgtcgtagtaatagattgctgtggattcatgagtaatttggggttattttacttccttggcaccaaattacacactcaaaattgacattgttgatcctatccaatgttcttctttttcaagaaaaaaaaaaaagtgggctgggcacggtggctcacacttgtaatcccagcactttgggaggctgaggcaggaggatcacttgaaggccaggagttcgagaccagcctggccaacatggtgaaaccccatctctactaaaaatacaaaaaatgtagctgggcatggtggcgggcgcctgtaagcccagctacttgggaggctgaggcaggagaatcgcttgaacccaggaggcagaggttgcagtaagccgagagcacgccattgcactccagcctgggcaacaagagtgaaactccgtctcaaaaaaaaaaaaaaaaaaaaaaaagaagtgggggctgggggaatgttaataaacatttacttctgccatgtgaggtaggaatggatgatgaagtgttcaaggctccctactggatgtccacttaatttgtatctttagaagttgacttagtgcttttctgaggtcatccagtaactttcccatttaatgcaaaataacaagctagtcactgtcttgaggagacacgttgtttatctttagtagttattttgcagctaggtggggtaaatttgcccagaactcctacaggatatgaatcatttgcattcatagactgacctgttctcactttgttctttctgaaaagagttttaatacagcctgtattatataacataggggatacattgtcatttatattttcagcatcattctcaagtcaatttgcagactctatgataaacctgagaacttgagttgctatgattaacatctcatgtacattcaaataaacaagcaaactgtagaataaatcccagaaaatgttattagctttttgtacacgttatttgaggtctttgaatattgcgggagagtattggaatagaggacagagtgcagatggcaacacggaaacctgcaattactgatgtttttaaaaatgtgtgtcatagaccaagcttggtggctcacgcctgtaatcccaatgctttgggaggctaaggcgggagggttgcttgaagacagaagttccagaccagcctgggcaacatagcaagaccaaccctgtctctacaaaaaaaaaataaaaagaaaaaagaaaaagttagctgggcatggtggtatgcactggtacttggaggcctgaggtgggatcacttgagcccaggagtttcaggttgcaatgagctatcatcacaccactgtccagaagctgggcaacagagtgggaccttgtcttcaaaaaaaaaaaaaaaaaaaaaattgtgtgattaactttcataactttccatttatttatttattattttttttagacagaatctcactctgtcacccaggctggagtgcagtggcgcaaacgtggctcactggagcctcaacctcccagcctcaagcagtcctcccacctcagcctcccaagtagctgtgactgcaggcctgtgtcaccatacctggctgatttttttttttttttgagatggagtctcacactgtcacccaggctggagtgacacccatggtggcgcaatctctgctcactgcaacctccacctcccgggttcaagcgattctcctccctcagcctcctgagtagctgggattacaggcgcccgccaccatgcccagctaattttttgtatttttagtagagacagcgtttcaccatgttggccaggctggtctcgaactcctgaccttgtgacttgcctgcctcagtgtcccaaagtgctgggattacaggtgtgagccaccacgccaggctgttttttttttttttttttttttttttttttaagagaaaaggtcttgctgtgttgcccaggctggtctaaaaatgctggcctcaagcgatcttcctgcctcagcctcccaaagtgctgagattacaggcatgagccatctcacctggctaaaatgttattttatacaagtattatatttcttgttagagtaatctgagcgcttaattgacatatttggaattaatcagaaaggctaatagttatataaatatattggattgtttgtgtgagactaattcttggtaaatgaacatgaactacaagaaatggtcgacattagtgctgataaattctgaatctttacatgaagaatatgtgtcacagctgagtgcagtggctcacacctgtaatcccaacactttgagaagccaagacaggcaaatcaccagaggtcaggagttgaagaccagtcttgccaacatggtgaagccctgtctctactaaaaaaaaaaaaaaaaaaaagccgggcgtggtggcgggcgcctgtaatcccagctactcgggaggctgaggcaggagaatcacttgaatttgggagaagattgcagtgagccgagatcacgccactgcgctccatcctgggcgatatagtgagactctgtctcaaaaaaaaaaaaagaatatgtgtcagaagagagaaagggaggtatggccttaatgctattttaatttataagatagaggcctggtattcttggattctggagcctatcaagacatttcaaggtataggtttgaattgaaaaagtatggaaagataagatgagctttcaagagggatgctgatcataagtctttagggtttattgtctctgtgactatggtcagaccagcttcactgtggaactggaacttaagaatgaaaaaggcagcatgctttccaactgcctgactgcttgttggcctcaccggtgggagctccagcatctcctttgctcgaaatggaccccaactgctcctgtgccactggtggctcctgcatgtgcgccggctcctgcaagtgcaaagagtgcaaatgcacctcctgcaagaagagctgctgctcctgctgccccgtgggctgtgccaagtgtgcccagggctgcatctgcaaaggggcgttggagaagtgcaactgctatgcctgacgtggggacagctctgctcccagatgtaaatagagtaacctgcacaaacctggattttttaaaaaatacaacactgagccatttgcttcatttctttttatattaaatatgttaatgacaataaaacaatttttacttgaagaaaaaaaatgaaaaaggctgagtgcagtggctcacgcctgtaatcccagcactttgggaggccgaggagggcggatcataaggtcaagagatcgagaccatcctggccaacatggtgaaaccctatctctacaaaaatacaaaaattagctgcgcatggtgatgcatgcctatagtcccagctactaaggaggctgaggcaggagaatcgcttgaacccgggaggcggaggttgcagtgagccgagtcgcgccactgcactccagcctggcgacagagcgagactccatctcaaaaaaaaaaaaaaaagaatgaaaaggtagcatggtggctcatgcctgtaattccagcactttgggaggctgaggcaggctgattgattgagcccggaagtttgcgaccagcctgggcaatggggcgaaaccccatctctatgcaaattacaaaaattagccaagtgtggtggtgcgcacctgtagtcccagctactctagaggctgaggcaagaggattgcttgagcctggtatgcggaggttgcagtgagccactgcattccaccctgggtgacagtgagaccccatctcaaaaaaaaaaaagaaggaattaaaaaataaactttagtttttgccatagctctttatttcactaatgtcctcttccttcgtataaacaaatactaatctctctaaatatagcaaactatcaaaaggaaatagttttgtaccctgttatttatgaaacttattatgacaaactactcctaaagcagcttcagctatgattgaataaatgctggaaatccaggataaataagatactccacctccactttttaaagtaaataaatgatttgtgtttttggaatctcaagaaatttatagccaggcatggtggctcacgcctgtaatcccagcactttgggaggccgaggcgggtggatcacctgaggtcaggagtttgagaccagcctggccaacatggtgaaaccccatctctactaaaaatacaaaaaaaattagccaggcgtggtggcttgcacctgtaatcccagctactagggagtctgtggcaggagaattgcttgaacctgggaggtggaggttgtagtaagccgagattacaccactgcactccacaatccagcctgggtgacagagcaagactgtctcaaaaaaaaaaagtttactttctcacatgggatatattttacagttggtcaaatgtgcttgtgtgtgtatatgtgtgtatgtgtattcttttctctgtatcatatgtgatagtggggtagtgccaaacattgttaactctgatgaataatgtctcttttggttagatcattcttaccttactggtatctcttactgtttccttacctagttatgctgttattgcctatggctgtgccagctgcccgaagctaacttgtgagagggaaggttgccagactgagttctgctaccactgcaagcagatatggcatccaaatcagacatgcgatatggcccgtcaacagagggcccagactttacgagttcggaccaaacacacttcaggtctcagttatgggcaagaatctggaccaggtataagttggcattatctcattgtctctttatttggtatttcatgatgtgagcccatagctgaaagaaattatcttattgtataacccaagtactccaaaggatcagagagcagaaaatatcatttgataatactttcaatattataataaagatagcacttccctctctgaccattataggttatccaactatataaaattgaaatgcaacaaaattgaattatgtagttcctactttcttagtaatatgtctcagattggagagcaattagttcattttgttttgctaggggctttttcaaaactttcattgtgaacagaaagacatttaattagtattaaacctgtgctgtttgccttcaagctgacttaagtgcctcactgcctttggaagtagagtacagattgaagaaaaggaaacagtattagtatagattaatgattaaccttaaaaggaggaatgtcacacattcagctccaaccttggcgagtcagaggaaacctattttaaaatgtcagtggatttattgctttgtacttttattttgctgatgtcatttgggagaggctagtaggaaagattttgccattcactttttcctggcacagcataatttcctaaattgtcattttattaggatagttcataacttgctctgaaaattaccaagtatatggtagatagcatacccagttgtttttaggttttgaatttgaaagtatcatgggaagggattgtgggctatgttaacagcaaatcacaatgatacatgttgaacctgaaaaataaatttcccaaactaaagtttttaaaaatgtaaagctaattccaggctgcaggctattctttctgtaggattcttcttttaaatctaccagcctatcgactggtagaaatttcatttttcttggaaacatctttctccctaaggaaatctccttgctagaatgtggttcaagtgctgtgtaagatgccagttgttgggataggcagctcaataagagacaggattcattttatgaaaattcctgaggtctagacatagccaaccttccagtaaagtgggttgtacaatttggagtgttcagtgaagagttcttgactgctgcctcatttcttatatatactcctaggaacaattaaatcaaactggatttaactaggggtattttttctacccattcttcccccactcatagcagatgacatcaagccatgcccacgatgcagtgcatacattatcaagatgaatgatggaagctgtaatcacatgacctgtgcagtgtgtggctgtgaattctgttggctttgtatgaaagagatctcagacttgcattacctcaggtaagatgggaaatgcatccattcctttcgtagtctcattctcttactgatttagggaaaaggatgtcaaaaagacacatccgttctctcattacaggtttaaggaagctgtgaaaacttcttctgacatgctcctctaatcatgttttcaccagctactattctgtttctacctttctttgcttgccatattacaggtagtctggacttgctttttcccttttgctgtcttgcctccatacttgttcatgttctttcctttgcctagaatgctttctgcctaccttccagtatcctccttttatctcaacttgttcagttcttatcttttaagagccacttaaatgcctttcatccatgttgcctctcctttttccgcctcattctttgactttcttttatcttttgtcataaatatcgtcagtactttacacttcacgtacctatcttatcttactaaactgtaagtatcttgaggctagagttgtgacctttttacagttttttgcatttagtgagttcccaaggaattcattaagtgaattctttttttttttttttttaagacagagtttctctctgtcgcccaggctggagtgcagtggctcgatctcgactcactgcaacctccacctcccaggttcaagtgattgtcctgcctcagcctcctaagtagctgggattacaggcacctgccaccatgcccagctaatttttgtatttttagtggaggcggggtttcaccatgttagccagcctggtctcgaactcgaacctcaggtggtccgcctgcctcggcctcccaaagttctgggattacaagcgcgagccaccgcgcccagcctcattgagtgaatattaaaatgttgtggaggagttaatatttacaaacaaaatgtttgctaatatttacaaataaacaaaatgtgttaatatttacaaacaaacattcattgtgtaaatgaaacacaacaccttcattgccaatttgtcgaacatttgagtacttactgtgtgctagtcattggggacataggggtgagtaagacatgatccctattttcaaaattgtttatcccttctagtggagaagatagcacaaagagaatgggcaaaaatggttgggcacagaagggctgactgtaaaagtagccaaactcagaataccaaactgatagaaaggttatgatgaggtctttttatatcctctcccacgaacatggtttgcagtatctattaggtatggtaggacatatgccaagaaaactacacaaatcagagtgttcattagtgcagggtgcagtgtgtctggatgggatgtcaagtgcataaggctatgcagcatcccaagtattgtcagtcatggaagctagatcagttttggtgggttagggaagacagaattcagcagagaagaatggaaaaggaatttcaagtctggaagcctgtctttacaacaacaaccaaaaaagttaaagagcccagagctctaatagtctggccttgtcctttgctctcccttgtgtaatgtattcatttcccataaactcttctgttaatccttactgaaaagaaggctgttgctgttatcaagccctatgataatactagctgtatttgtaatgttgacattaacttcagtctgtttcccctgcagcccctctggctgtacattctggggcaagaagccatggagccgtaagaagaaaattctttggcagctgggcacgttgattggtgctccagtggggatttctctcattgctggcattgccattcctgccatggtcattggcattcctgtttatgttggaaggaaggtaagaaagacatgctggtttctgtgcttgtttcaactttaggttcgttagtaaaggtttgagggaaatgggaaggagctatgtttcagagctgcctgaaaaccagctggttcttagataaaaataaccttactttcttaaatggattttcataaacccccatgagatctgaaagttcttattaacatcctgggcctggcttgtctcagtgacttaaaggtagaatgctgggccaggcatgatggttcacatttgtaatacgtggcctagcactttgggaagccaaggcaggtagatcagttgagcccaggtgtttgagaccagcctgggcaacatgacaaaacccatctgtacccaaaaaaatagaaaaattagctgggtatggtggcatgtgcctacagtcccagctactagggaggctgaggtgggaggattgcttgagcccagggacgtagaggttgcagtgagccaagatcgcaccactgcactccagcctgcatgacagactccaaaaaaaaaaataaaagaagaaggtaaaatgcttacttcattctgctggagttattttgtctctttttggattaactttgcctgtattactttatatcttccaggtctgagttaggttaaaatttgataaagatgcctatttggggtagaggatatgttttaatatagataacttacaagtgaatattcacctgtcctttttttctctggcaaaagattgatgtcctaacctgctgacctggattttctttttttattcttagattcacagcaggtatgagggaaggaaaacctccaaacacaagaggaatttggctatcactggaggagtgactttgtcggtcattgcatccccagttattgctgcagttagtgttggtaagctagtcaggaccacacctcttctctctcagctttctgaccatagcagtttagccagatggccagatgtttctcaaagactcctacattttatgcgaacccaccttgatagtaaattctgttaggcaccatgattatgattatttttaagtttttcaagcacaccaaattatcagagtgtgcaatcttttgttcttaagttagtgcctagaactccatttggcacatagaaaaggttgaattacagaaacttattttaagccctagttttcacctttcatcttccttctctacttgccatgaaatccacaaaacaaaattacttttgttttgatttgtttaatgcttcacattactttgggaggcataagagtttgttttagaataataatagtgtaactaacatttaatgtggctcttcatgtgccaggagtggttctgagacttttgcatatattaatttatttaatcctcacaatccttacaaaaggaagcacaattttaatagaaaggtgcagtaattggctgggcgcagtggctcacgcctgtaattccagtgttttgggaggccgaggcgggcggatcacgaggtcaggagatcgagaccatcctggctaacacggtgaaaccccatctctactaaaaatacagaaaatcagccgggtgtggtagcgggtgcctgtagtcccagctacttgggaggctgaggcaggagaatggcgtgaacctgggaggcggagcttgcagtgagccgagatcgtgccactgcactccagcctgggcaacagagtgagactccgtctcaaaaaaaaaaaagaaaggtgcagtaattttcccaaggtcacttagctgggacatgaatcaagttaatctgccttcagatcctgttctcttaacagctaagccattctacctcacacagcagtaagattttggaattaacatcctgaggagatcctaaactccaagcagtagtcacttatttaatatttgattcttgattggctcttgattgggttagcatttcagcagtgattagaagaggggaaaatgaaagcaacatatatttactgtgcaaaacacagtacatagcattctcatttgattattgacaaccctgggaagataggtccaaggttatacagctagtaaatggagccaagaatctaatccagacctttctgatttctagcctggtcatcattctgttacaccaggccacctttttgggatagccactttctgtcttcctttctttataaagtggtttgtccatgcccagactgggaagaagaattcagggcacttgcaacctaatagccagctgacatgtttccttctcttcccccaggtattggtgtccccattatgctggcatatgtttatggggttgtgcccatttctctttgtcgtggaggcggctgtggagttagcacagccaacggaaaaggagtgaaaattgaatttgatgaagatgatggtccaatcacaggtaaaaagcaggatgtttatttccatttgaatttatgatatacaagataaaaatcagtaaaattcagcgcattttacagggagattgtcattggattactttggataatgagctttgtagggggtaaagtatttttagcttttcatttctttgttccaaagttattaggttaattcccctggtacttgcctctgtgtggcaggtacaaactagtaggaatccaagtaactccaagtatgctggtagtagtagtgattataataacatctttatatctgcacagtacttgataattttcagagtattttacacaattatctcacttgctttttacaacaaacagctctctgacgagggaggatggagctgttatccccatttaaatgggaatttctttttttttttttgagacggagtctctgtcacccaggctggagtacgatgtcgcgatctcggttcactgcaacctccgcctcccaggttcaagtgattctcctgcctcagcctcctgagtagctgggactacagcaacgtgccaccacgcctggctaattttttttttttagtatagacggggtttggtgtttcaccgtgttagccaggaagatctcgatctcctcaccccatgatccgcccaccttggcctcccaaagtgctgggattacaggtgtgagccaccacatctggcctaaatgggaatttctttaagctttcatcttactatctattaagagcttcacagagctgagactagggcaagtcttctgacttttactttaatgtggtttctactcgtagtaagtaacgtagggcacaagtaacgtagaaaaccccaaaggtttttctagcttccttttttcttttctttttttttttttgagacggagtcttgctctgttgcccaggctggagtgcagtggcatggtcctggctcactgcaggctccggctcctgggttcgcgtcattctcctgcctcagcctcccgagtagctgggactacaggcacccgccaccacgcccggctaaattttttgtatttttagtagagatggggtttcaccgtgttagccaggatggtctccatctcctgacctcgtgatccgcccgcctcggcctcccaaagtgctggaagtacaggcgtgagccaccgcgcccggccggtttttctagctttctactagaagcttcctattaaaatcagcacatgacccaaacatattttttaaatcttcacgtttggttacatggaagcaacagtgtagtggaaagaatagtggccttggaatcagagttatagtttcatgtaactaccatggccttggacaagtcatttagttttaaattttagttttctcatctaaaattgaggctattaatgcctagttatttggaggattaaatatgaacatatgttaaaacacctgatatgtggcgactgcacacagtacctgttcattaagtaaatacattagttctctgaaaagtcattgcaggaaaatgcctactgactgttttgatgctctgctgtcttgaattggatgtttggttctatccccagtggcagatgcctggagagccctcaagaatcccagcattggggaaagcagcattgaaggcctgactagtgtattgagcactagtggaagccctacagatggacttagtgttatgcaaggtccttacagcgaaacggccagctttgcagccctctcagggggcacgctgagtggcggcattctctccagtggcaagggaaaatatagcaggtaaacaaatagataatttctgacagaaatggttagaattataagaagtaacacattgagccatttctctgtgccaggcttgtgccacgtatcatcttattttgatttaattgtcaatggttttgttttgttttgtttttacttttttatttttaaagacagagtctcactctgtggctcaggctggagtgccatggcgtgatctcggctcactgcaagctccgcctcctgggttcaagcgattctcctgcctcagcctactgagtagctgggattacaggcacccgccaccacgcccagctaattttttgtatttttagtagagatggagtttcaccatgttagctaggatggtctcaatctcctgacctcgtgatccgcccgccttggcctcccaaaccgttgggattacaggcatgagtcactgcgacaggcctttttttttttacttttacaaataggaaacaagcttagaaaaaaaggttacgtcagttatgcaaagttcattgttctttccattgcaccatagctgcctctatataaagaataatcctgacttgagattcccccttgactgcctgaggctgcctgcttcaggaagggagagtaggcatttttatagaattcgtaaaatgctctccgttaggcttgtcattggctttcagtagcatttatgctgtatcatggcttatttattttattttatttttttgagacggagtcttgctctgtcgcccaggctggagtgcaatggtgcaatcttggctcgctgcagcctccacctcctgggttctagtgattgtcctgcctcagcctcccaagaggctgggactacaggcgtgcaccaccatgcctggctaatttttgtattttcagtagagacagggtttcatgttggccaggctggtctcaagctcctgaccttgtgatccacccgcctcagcctcccaaagtgctgggattacaagcatgaaccaccacacccagcccatcatggtttattgatagtgggctttggggatttttttttgttttttttctcactgtgtcatccaggctggaatgcagtggcacaatcatggctcactgcagcctcaacttcctggactcaggcaatcctaccacctcagcctcctgagtagctaggactacaagtgcacacaccacacccagctaacattttaaattttttgtagagatggggtcttgctcggttacccaggctggtcttaaactcctggcctgaagccatcctcccaacttggctcccaacgtgctaggattataggcatgaaccattgcccccagctggtttagtgatactgcaatccttattacctttctatttccatttgctagataaggaaaatcaattctatgtacttgtgttgaaaatatgtaaagctttgtaactaaaaagattgtgacttgcttggtcatttcactagttaggcagaccagagtgtatattttcagaggagcataacatgttgcctgagaagcagttgaatgcaacggagaagaaaggcctagggaggggtaaaggtagaacaaagcaggataggaaggtagaggagatggttgccttcagctatccaaaggaccttcaactgtgaaaaggattagacttctatgcctcataccaaaaggtagattaagatgacttggcagaagctaaagggaaactaattttggttcagtatagagaatatagggaaaagcaacatgaaagcccaaagaggaaaaaggctactttagtagatactgagctgcctatccctggaaatgtttacaatgagaccagatggctatttggctataagaaggattcaagcaacagatggcaggtggactggatctcccacctgagtgcctgtcaatcacttgggagcctcttaaaaatagacttcagggacccatcccagaatgagtagcttagaatttcctggagtggcacctagggggtgatccgtgttttgcaaaagctccccaggtaattctagcacagccgttgcatgaaccagcatctgacaaccacctaagtaggagccctttctgaaagactcttccaactcagagtgattctgtggcagacctgaaactagaagccaggtctctgacactgtgcactttccattgcattccctcatttccctgggccttggcacatttttgaagggcacctgaagctggagcagcaaagcaaaggctcaggcagtaggatggaagctgcttgaatgtgcagctgcaggctgctactgacccgtctgtgcatctcatgactctggttgtctcttatcaggggatcccgcccccacatgctggcatattcactgctgtgctttcttaaaaccaacacccctgtaaataagcagacagacataattggagactgacttgctgaaactgcagcttagccagtccagctgttctagttctgtgaaagcctttattttataggaagtgaatgagtcagatgggtttgactgtgaaacccattataaggaaatacttaactgtgcaacaaagtgatgttggagccaagaaaggcaatagttatgggctctgagacactattgggaaagtttgctgctccaagaggagggaagaggttggctcctgtatgtccttcagtctcattccctggaggtaatttgattgttaaatgtttgatttcctattatgtgcaaggcagggaaggtaaagtgtgtatgagttgtggtctctccttttgtggagttaacagacaagtgagagatgcataataataagtaggcagggcctgcgcacgcctgtaatcccagcaccttttttaggtgggtgatcacctgaggtttagagttcaagaccagcctggccaacatggtaaaaccccatctctactaaaaatacaaaaattagctgggtgtggtggtgggaacccataatcccagctacttgggaggctgaggcaggagaatcgcttgaacctgggaggcagaagttgcagtgagccaagatcgtgccactgcactccagcctgggtgacagagtgagactccctctaaaaacaaataataataaataagtaggcaggtgctgtgggagtacttagcaagaagtgaatggtttgctgggataatgaggggaagtgatagttcctttgttgttaaggactgagtataagtttgtctggtagagaaaggaaatttctagagagacagaatagcatgtgcaaagtcatggaagtataaaatgtataggtatttaaagaaagaaagaattcagagtgactatgatttcggatctatagggagtgatagaactggacagagagcttcctggcagatcaggaagaccttaatgcctgttggcagtagggagccaagagttagagaattgttagagtgattgggtctttattcacactggcactgttctagaggttgtttgacttggacttaagggctactggagagggagcccagttttagtcatccaggcaggagatgatgaaaacctgaagttcagcagtagctgtggggatagaaaggaggggacgatttcaatagatatttaagagaaaaaatgtatgggcatctatttgcgctgtttgacagttggagaagatcagacagacaaccacaatttgcaagagagtaatggaagagatgtgtgccaggaagcagactgtcttggaatacccaggtctcatattaacttgaacgtcccctctttacacaggttagaagttcaagccgatgtccaaaaggaaattttccccaaagacacagccagtcttggtgcaattagtgacaacgcaagcactcgtgctatggccggttccataatcagttcctacaacccacaggacaggtatgtgaacagtcagatgtccaggagaggttgcattttttcgttgggtactaggtcttcagaagttcaatgcctcatgttagggctgtatgtaccatctcctgggatatatagtgtaacctgtgaattcatttgagcaagttcttggtacttgagtgtttggcatctcttgattcttcttgttagcgcttgatttttagagatttcttttctttcttccttttatgtattttttcttttttttttttttttttttgtctttcttggctattgcaacagtgtataattacatggaacttaaagagctagattgatgttcattgatgtcttcaagtctagggtttctgcttgccctttgcttgataggattcccatagcttctttctctttcattttgagaaactggtgtatctgggatggtgtgattgtggtactcccactagtaggtattctggcttcttctacttgtggcatggtagtaaaaagcttttacttttctattttgagtaagctagcatggggctctgacccttagttgaattttggaagctctttctgtatgtttaaagagattggctgagatacacgtgtgtgtgcatctgagcacacgtgtgcatgtatagttaaatcagcaaaaaggatctaattactcttctccatctcatttatttttatttttgtttttttagagacagggtcttgctctgtcaaccaggctggagtgcagtgacacaatcataactcactgcagccttgaactcctgggttcaagtgatcttcccatctcagcctcccgagtagctgggactacaggcacgtgcctccatgcccagctaattttttttattttagaaacagggtctgactttgttgccctggctggtctcaaactcctggactcaggcagtcctcacacctcgacctcccaaagcgctggggttataggcatgagccaccacgtccagcctccatctcatttgagtgttagattaaaatgttatttttgttaaaagtgagctctagttaactgttcacctatctttttgaaattcctaatcctgaacccatgaactgcttttaccaacaggtttagcatgatccatgcatgactcagcaaagtggattttgtctccacagagaatgcaacaatatggaaatccaagtggacattgaagccaaaccaagccactatcagctggtgagtggaagcagcacggaggactcgctccatgttcatgctcagatggcagagaatgaagaagaaggtagtggtggcggaggcagtgaagaggatcccccctgcagacaccaaagctgtgaacagaaagactgcctggccagcaaaccttgggacatcagcctggcccagcctgaaagcatccgcagtgacctagagagttctgatgcacagtcagacgatgtgccagacatcacctcagatgagtgtggctccccccgctcccatactgcagcctgcccctcgacccccagagcccaaggtgcaccgagcccaagtgcccatatgaacctctctgccctagccgagggacaaactgtcttgaagccagaaggtggagaagccagagtatgaagtggaatgaatgctcctgttctgagaagcacacttgtaactgcatcttttggaatttttttttttttttttccaaggggtagagatttatgtattttatttcacagattctctggtcacaggtttttgcccagggaaattctgagaaattcacaatttcttaccagataaaacatgaaaagtttgccgttagttcccctcccctcccctccctctttttagttttaatttattggttaaactgatggcagcaatccatgaggtgtgtcaaagagtgtacatatgtatgtgtgtatattgaatgctaaacatattactgaaagacacattttaataaagatttctgtcataattcaacttacctcattttccttggcttggatagtcccacagagccaagtgtttgaaacaaagcaccatctttgacagtctctagacctgaatttttctaatccaagggaagaaggattgtattcaaatccaaccgcagtagtcatctataaacctatgactcctagcatgacaggaagcaaagctaggcttgttttggactttgtagtcaggctgaagaattattagctgagtcagctgaatagggaagcagtagattaaaactaactttgtttgccctctagaagcaactgtgcaatttactcttaaaactttgcccttttctgcattatagtcactagtagtcatatgcttcagaggagagaaggagtggcagtcccaggtagctcttaagagaattctcagtggtcaggcatggtggctcacgcctgtaatcccagcactttgggaggccgaggcaggtggatcatttgaggccagctgtttgagacccacctggccaacatggtgaaaccacgcctctattaaaagtacaaaaattagccaggcggtagttgcgcacgcctgtaatcccagctactcagggggctgtggcaggagaagcgcttgagcctggggaggcagaggttgcagggagccgacatcactgcaactccagactgggtggcagagaccctgtctcaaaaaaaaaagagttctcagtgaatgttgcatggttacaagttggagaacagaatattctgttattggaggaagaaatacactgatgcgcataatcacaaagcaatgacataggtgtttgctgtgttctcaggtataccactccgtgttctgataaactttctcagttttgctaatctggtttaaataaaagggactaaaatctgagatttgtaatgaaaggagggggtatgccctcaaaatctctgaacatatttatctgatcttacaaatttgtcaaaattgagctaagtttgtactacttggagttttgcctctgtgtaaaataatgtcctggccgggcacagtggctcacgcctgtaatcccagcactttgggaggctgaggcaggtggatcacctgaggtcaggagttcgagaccagcctggccaacatggtgaaacccccgtttctactaaaaatacagaagttagccaggcctggtggcatgtgtctgtaattccagctactcgggaggctgaggcaggagaatcgcttgaacctgggaggtgctggttgcagtgagctgacatcacccactgcactgcagcctgggaggcagagggagactccatctcaaaaataaaataaaaaataaaataatgggctgggcgcagtggttcacacctgcaatcccagcactttgggaggccaaggcgggtgaatcacgaggtcaggagatcaagaccatcctggccaacatggtgaaaccccgtctctactaaaaatacaaaaattagctgggcgtggtggcgcacacctgtagtccagctactcgggaggctgaggcaggagaatcacttgaactcgggaggcggatgttgcagtgagccgagatcgcgcctttgcactccagcctgggtgacagagtgagactccgtctgacaaaataaaataatgtccttagaagtgaaagcttatatacagtatagcaagaaaattagaagactcgtgaaacctgatgtcagattccaaatcttagagtgacttactttgtatgagtcagtttcatgcccctaacttccccaactttcagatcttatttatgtatttagagacggagtctggctctgtcccccagactggagtgcagtggcatgattttggcacactgcaacctcagcctcccgggttcaagtgattctcaagtctcagactcccaagtagctgggattacaggtgcatgccaccacacccggctaatttttgtatttttagtagagatggggttttgccattttggccaggctggtctagaactcctgactcaagtgattccccccacctcagcctcctaaagtgctgggattacaggcatgagccacctcgcccggccctcagattgcatttaaagagcttccagtgtcagacctctctcaccttagtcctgggcccagaggaaaaattgaaatcctcctttccctgaagaccagatgactttctgtttcctttcacagatgcacttttgtcttcctggccagtgttttactacaatgaggatggcaagtctggacaacagccagcttagaagattcttatctcttgggcactgcagccagacttcacacatttccctgcacctaggacaggaaatgctgttagtggactttggatttctggaagaatgttccctgaagggggcgtgtacttgtgtgaaaaagagaacttgttggaaaaagaggcagacagcctggagatctctgaaacgcaaattatcaactcaaaacttggaattctcttgaagcctcgagagaacaattcacttctttgataaaatcaaagaagtctgttggaggggcagtagtttatggctaaacctatatttcttatctgggttccacttactacagctgtgagatttgggcagtttactctgagtctgttttcacttagccaaaatggagatgatgatcctagttaaggggttgtgaagactgagatggtatactgaaaatgtttttggtaaaggcccatgttttttcctcctgcaggaagaagaagaaatgagttaaaggagattttagatatcatataagaaaggaagcctagacctctaggccagaggctatgaaaaatttaaatttattctaatccttagcgacactttagtagatgaaaaggcccatcatcaccacctagaggcgaacacaaataatgcattagaaaagttacaatagcttggccgggcgtggtggctcatgcctgtaatcccagcactttgggaggctgaggcgggcggctcacaaggtcgggagatcgagaccatcctggctaacacgggtgaaaccccgtctctactaaaaatacacaaaattagccgggcgtagtggtgggcgcctgtagtcccagcaactcgagaggctgaggcaggagaatggcgtgaacccgggaggcaaagcttgcagtgagctgagattgcgccactgcactccagcctgggcaacagagcgagactccgtctcacaaaaaaaaaaaaataataataatagcttagaaaatggagaaagtttaatttcctcttcatacagccttcattcattctgaaatacctaccgcatttcaggtataagatgtagcaatgactaaaatacaaagttcctgtccccatggaacttagactcttaacgggggaaggcaatcagatatataacctggagtgaggataagtaatctgtgaagaaaaacagggaagacagagtggtagatagtgctacttgacatgaccaggttggtcctccttgataaggttccattttattagagactttaatggagcaaggaagagaactatgtgaatatctaggggaagcacataccagacatgaggaataaactacaaaggccctttggtagagcatccttagtctgtttccaaaaaagcatagtatagaggcctatatggctggaacaaagtggaccaaggtggggagagtagtggattaggtcaaagacagctggagcaagattgtgtagattagccaaacaactctgaagacaaggaaattttagatttctttgggccaggaggaggtaatcttcagcgccagacagatgcagtgcttgcggccagctttcaaaaaggttgaaactgggaggggcatgtctgatcactagtactacttggacaggccaatgtgaagaagcttgtggatatggtaaatgaatactcatttatgctcacctaatgtaccttcgtatgctgcagaggctggaaaactaaaaacttcatgtcttagatttccttgaaaccaaggttctgaatgtaacctaaggtcaagttttgccagttagatgcacaaacaagatgtggaaggaggagtgattcaggggttatctttagctactttggctattgctcctgcaagatgtagagaccttaggtttctctttaactgcattctaatagccatcagtagctttgtgggtgttgaagggtgtctggatccatagatagcagtttgcgatatgttttcttgtagtcaacctgtagtggcctcctaattgctcatctcccctatggtggcagaggtagcagctcacatggaaggctaattccaggtctgggaatcgcctggaggcccagcctatggccatgttccccaggctttccagtgcttttgtaagcacctaatttacctgtgttgaatccttttccacttaaaattggtagaggagtattgtttcctgcagttactgaatcctggctaatatagtatttggttccaaaagtggttactagtaacaggccctcaaagatgggcttcttagattagttatgactaagctgcatttgaatgaaatgtagatctagtcaccattggaaaatgataaactggtaggcaaattgcttacacctgtggtcacctgaaatgaaatgtcttttggagaaaagacgttggcacctcaaagggctgccatgatagatcatcatgtaagaaatggggacaaatgatggtgactacactagaggggttaaaggaaaaagacaaaaagctcaaaagtttgacatttgcagctcaaggcatagtatgggagagacccaaaagaattttatcttttgtagccgcaaggctcatgtacatcaaaatcaaagggagattctggatcactgaattacatacaacataagttgaattcgtagctttaccaggcctcttatgtgaaaatggggctctgaaatgagcaatggggacccttgagtggatttggataaatcctagtgctgtcaactcacaaactctacttcttttaaccagcagaagcagccattcttccccttatagatatggctggttctgctgcttgaagaccctggggtagttgtcttaaaggggaatactaatacttctcgtgtcccaccccctacccctccttgctaccagctctaactagagtcagatcccagtatgcttctggaaggcaaacccaaagtctgatctgagagacttacagaagaattgtaagactttgctaatttgtatcagcagaaacaaggggaaaatgtgtagagtatattccaaagatgttggaccaggaagataggaatatacatttattttcatttgcattgaatttatcaatatgggggtactagaggttctggactcagcatattggctttagcagctaagaatttttttttttttggagacagagtcttgctctgttgcctacgctggagtgcagaggcgcaatctcggctcactgcaacctctgcttcccaggttcaagcaatcctcccacctcagcctcccaagtagctggaattacaggctcatgccagcacacctggctactttttgtatttttactagaggtggggtttcaccatgttggccaggctggtcttgaactcccgacctcaagtgatctgcccaccttggcctcccaaagtgctgggattacaggcgtgagccactgcgaccggccaagaatggctcttaacaggttgttggatgaaacctggacttaaaagtggcctatacagagatggcaaaaattccttagtgtagaattagaagaatcaaggccaggtgttgtggctgatgcttgtaatcccagcactctgggaggctgaggtgggaggactgcttgaggccaggagtttgaaactagcctgggcaatatagtgagaccccatctctacaaaaagttaaaaaattagctgggcatggtggtgtgtgcctgtatagttccagctactcaggaggctgaagtgggaggattccttgaactcagggatttgaggctgcagtgaactatgatcgtgccactgcactccagcctgggcaacagagctagaccccatctcaaaaaaaaaaaatcagccgggcatggtggctcatacctgtaatcccggaacattgggaggccgaggcggatggatcacttgaggccaggagttccagaccagcctggccaatatggtgaagccctgtctctactaaaaatacaaaaactagctgggcatggtggtgtgcatctgtagtcccagctactcagaaggctgaggcatgagaatctcttgaacccaggaggcagaggttgcagtgagctgagatcatgccactgcactccagcctgggtgacagagcaagactctgtctcaaataataacttaaaaacatgatactaaaaacattgatttgtagatttatcatatgtgtgacctacttacctcctaattttgcccttcaaaattgccaagaggttatttctttcagcaaggaattgaaaagtactttaaacaagggaaacaccttatcttgaaaagtttgtagtgtgtaccttccctaggctggaaatgaagctaagagatgttaccattgtaaaggaatccctgatatcagtagagatgatgggatcctgcagtgccagtggccaaggggtagtaccaaggcaacagagctgtagtgatgaaatacatgggttacctaccaaggttctatttggcttatagaacgcaaaacaaatcttcaggtctggcaaatagaggcctgttttgagtcaccaaaatggagatttacagacaattctcagagctgaagcccttgaaaaagggggtgcagggtactctggaggaagcacccagcaataccaccataactatatcataaatcttctcgttttccccaaagggatcttaagccatgtaactatgcatgtgtgcttagggaaatggaaatgcccaggcctttagggattacttggaaactggccctaagccagcacaaatgctgagacctaaaaagcctttgtggtccactagttagaatagaggcttccatggtgttatgggtcgaattgtgtcccttccaccaaaaatcatatgttgaagtcctagcccctagtacctcaaaatgtgcccttatttggaaaatgaggttgttgcagatataattaagatgaggtcttattggcatagggtggccccctaattcgattgttgtacatataaaaaggggaaatctgaacacaaagacatgcacataggctaagtaccatgtgaagatgaaggcagagactggggtgatgcagcagaggccaagggacaccaaggattgccagcaaaccatcagaagctgggagcggcaaggaacagatcctcccccacagcccgcggaaggaaccaattctgccaaaatctaggacttctagcttcctgaactgtgagacaataaatttctgttacttaagtcacccagtttatggtactttgttatgggagccctagcaaactaatatacgggggtcaggtgataaaaaggagttctggcctgcatcgatctcacgtactcattaccagttcctttaggcacagttgtagtagacgcactcggcgactggtagaatctgcacattgagtgactcatggagtgaaagctgttgtggtaagaagagcaaagggaacccttgaaattgccctttcccaccaaaaacataaaccaaaagcgatagtgcatccctaagggaatgatggatattagtgtccgcatcaaagacagaaatttcaggaatgatggctcctatcatatccacatttaatttacttgtttggcctatgcaggacttgatttttagctgttattttagatataatctctttatgaagcaaatcaacacctgccccggcccctacagtcgtgcaactgaatatgagtactgacctggaatatgcttttttctctagcccaaatagcagaaaacatcaaaaacagattactttcacctgtcagggtcaacagtacattacactgtcctgcatctgggttatatcacccttgcagctctgttgcagtctaatctgcaggcactttaatcatctcacatctcccagaacattgttctacatgtctggaatcttgcaagcaagaagtagcaggtatccaaatgccctggtaaaacatgtgttctaaggataggagataatccctgtggaaattaagagaatgtctacctccgtgatttgggtcaccccaccagataaagaacttaatccagttcatatactggctgaggaagaaggatcatggactggatggtggagaaagaaatatatataaatagaaacaactaactcatgaaaagctgagaaacgggcactatattagcatttcatattttcttccttgctctattgtgttaatttatagatattaactcattttcccctcccatattttccctagtataatgaaatgtattactgttggtaacttgttaatttagtgtttagattatatgctgttatggtagaattgtaactgaactagaatgataatcacccagggtggatcagctagctatgtgactgatgggatttggggtctcttattttaaggagcggatttaggtccctaaaagtccaaaaagatagactgtgtagacatggtgaactgactttcaacatccattccaaacacttcctcatactgcagaggctgcaaagataaaaactatttcccagactcccatgcagctaacattccgcatacaagttggagtctaccccatcaatggatgaaaaaataaagaaaatgtatttataaatgatggaatactattcagccttgaaaaagaaagaaattctgttatttgcaacaacatggatggagctggagaacattatgctaagtgaaataagccaggcacagactaataccacgttaccacttgcatgtagaatctaaaacaattgaatccatagaaacaaagtagaatggtggttaccagaggctgagggctgaggggaatagggaaaatgatggtcaaagggtacaagacctcaggaggaatacgtttgtttgtttgtttgtttgtttgtttgttttgagatctattgcacagcatggtgaatatagttaataatagttgatagagtttggatatttgtgcccatataaatctcaggttgaattgtaatccccagtgctggagatggggcctggtgggaagtgattggatcatggggtggatctttcacggattgatgctgtcctcacaatagtgagtctagagatctggttgactgaaagtgtgtggcacctcccccacctctctatttctctggctttcaccagtattaagtgctctgccttccaccatgaataaaagcttcctgaggcctccccagaagccaagcagatgccaggtaccatgcttgcacagcctacagaaccatgagccaattaaacctgttttctttataaattatccagtctcaggtattcctttatagtaatttgagaatggcctaatacaatagtatatgattgtacatttcaaatgtacatcatttgaagagtaaatttcaaatgttcttgtgataccgtaacttgtattaagttgattgactctctcttagctgagaaagcgagatggactccatttggctccttcctttgcaagacatcaagggctccttacccacccccttcctcaaggacttgtgcaagctgactctcagcatatcaaagagtgcaattaactgataaggtactgtggcaagctatgtccgcgattcccaggaattcgcccaggtgatggtaccctaaagcccctgcatttgtgtccagcagatagcacccagagcccccgcacctatcagcttgtgatgaatttaaaacccctgcacctggaactgtttgttttcctgtaaccatttgtctttttaacttttttttttttttttttttttttttttgcctgttttacttctgtaagattgctacagctaggctccccgtcccctctctaaaccaaagtgtaaaagaaaatctagccccttcttcggggccgagagaattttgagctctagccatctctcggtcgccatgtaataaaagactcctgaattagtttcaaaatgtggtgtttctctataactcgcttggttacaacatttggaggccccagcgagaaattcgcccctgggtgagagcccgactcgttccaggctcccccggacagacggcggacttacaggggaggcgccacctgaagacgttccagggccccataagaccctatcttccggaggggaacggatcgaccaccggtgtgtgcccacaaaaaattcaactcctaagtcctcagtttctagtcccgggaaggtaagtcagatctgactctgtttctctgggagggaagtggctctgatgaaggccgtccctttttgactctgctcgcattccaggacgctggaggacggagtcctggttttctgttaggcgcctctgtgtctctctgagagggaagcagccctgacgagggccctcccgtgactctgtccatattctaggacgctggaggactgagtcctggtttctggcaggccagcctctccgttaagtctaggctgtctgtctctctctctctctcttctctctctcgctctctctctttctctctctctcctctctctccctccctccctctttctctatctcttcttctttcaggtctcctggagacctctgttttagaacgggaattaaaaaaaaaaacctgttgtaaactctgtgtgaatcagtgcatgtatgtggagttcaagggcttgcgcttgaatttccagtttgtagctccaccgtgaaagctacggaattcgagagggccctcacctactgttccgtggcgacctcatacggcttaaggcagcatctggcatagctccatctgagccgggggtttataccggtctgccaatgcgaagaggagcctaagtcccctcagggggagcagccaggcgggcatctgactgatcccatcacgggaccccctccccttgtctgtctataaaaattgtcataattgtttatataccccagtgtctattgtcttgtttagtgtctattgtcctgtctggtgtctgtctaagtttcttatgtctggtcgttgatattgcccaagacgactgggcaaggacttcttcaaagtcctgagtgcagattttctaacacaggaggtctcaggcgtgtctcttcgggttgccgggcccaggggccaggcgcgcctccaccagtttacacaacagcctcctttccctcggcagaggctccccgacctgcaggcgaggagtgggaggggacggcgcaggaccccctcccccagggacccccgcgggcgcctgactcctgcgccttcaggggtcaaaacccctgacatccctgagcaccagcgcgtccacacccggctcggaacgcaggggcccggcctgctgtggtgaccttagccccgggctgggcttctgagccgggcttgcagtgcctgacggggcctggaggcggggcgggggaccacagagtcgtcctggcgacacaggggacccagcgctgcccggcacagctcctcccagcctcagaagatccgagtggcccctttcctccacatccccatcccttaccccgcacatctcgttttcctgtgtcacagcaagtccagcgcccccaagatttggctctactctccctttttaaacccttaaaagaaaaggccaagtttgaactttttgcctcccagtcgtggagacaccaaaaatatttaggctataggtcaaggaggagtgagggatcacattggtcccactgacctcggacctgcctcttgtcctccccctagatctcaaagcttaaagagacagtccttatgtggcaagaagtgttggactatagttgttttcctgcttcttctggttataatacttctgttcttccgatactacagccccccaggttgtaaatttctctgtccgtgctgggtttaatatttcttctcaaaccttgttaaattgcctctagaatgagaaactcttcttcccggcctcgtaaagattggagccctctccaatgtatgttacaaaatttctctctaggcttctcagaggattatggggtctaccttaaaaaaggcaaactccggacactctgtgaagtagaatggccaaagtttggagccgggtggcccccagaagggtcactgaacctcgcaattgtccaggctgtgtggcgggtagttgctggaactcccagtcaccccgatcggtttccctacattgatcaatggctgagtttggtccggagccctcctccatggctccgctcatgaaccattcataattctacctccaaggtccttttgagccaaacctcactttcgcctcgactctcagccagcttggctcctcctgtattgcctccttctgaagaagaggaaagtctccctcacccagttccgccgccttataaccctcctgctcgcttacaatattcccttgtctcctcgactatgtcccctgtgggctgtccgcccatcgcctcccaactggggccatggcagaaggaggtagccccctcctcccgctgaggcacaaatcgctctgggtgatgagcactatctaattccgggacacttccatcactccaaaaagaaacctattggcaatcagtcctaactaccccttctccccagccccagaaccactaatctaatactttctctataaatcttcctattctggacattttgtataaatggaatcatacaatgtgtagccttttgtgtctggtttctacttagcaagtgtttttcaaagttcatccatgtcgtagcatgtatcagtacttcgttttgtggctgaataatatttcattgttttgtttttgtttttgttttttgagacggagtctcgctctgttgcccaggctggagtgcagtggcaccatctctactcacggcaacttcgtcctccccagttcaagtgattctcctgcctcagcttcctgagtagctgggactacaggtgcgtgccaccatgcccagctaatatttgtatttttagtagacacagggtttcaccctattggccagtctggtctcgaacacctgacctcaagtgatccacctgcttcggcctcccaaagtgctgggattacaggcaagagccgctgtgcctggcctgaataatatttcattgtatattgcatggatattgtatggatataccacattttgtttatccctcaattcatggacatttaggttgtttccgctttttggctgttgtacataatgctgctataaatattggtgctcaaatccttgctttcaattcttttgggaatatacccagaaatgggattgctgggtcctgtgttaattctacgtttagctttttgaggagctgccacacttttttctacagcagctgcaccattttacctaccagcaacacacaagggttccaatttctccacatcctccaaccgctgctttctcctggggttcctaagctgagaagatgtaagcatggatatttctttttgtctgttttattatagccatcctagtaagtatgaagtgatatttcattgtggttttgattcatgtttcccttatgacatgttggtgggcatctttttctgtgttcattggccacgtgtatgtcttcttagaagaaatgtctctttgaatcctctccccacttttttttgtttgtttgtttctgtttttgtctttgttttgagacggaatctcgctctgtcacccaggatggagtgcagcagtgcaatcttggctcactgcaagctccgcctcctgggttcacaccattctcctgcctcagcctcccaagcagctgggactacaagcacccgccaccacccccggctaattttttgtatttttagtagagacggggtttcaccatgttagccaggatggtctcgatctcctgaccttgtgatccgcccacctcagcctcccaaagtgttgggattacaggcatgagccaccgcgcccggccacctttccccactttttaactgggttatttgtctttgttgttgtgttgtaagactttatatattctggatgtaagtccctgaacagatatataatttgcaaatattttctcccatctgtgggcagtcttttcacctggtgtgttcttcagtgcaacaattctagtagtcatttcctgactcatcaccttcccaattgtgccagagttagtagctattctggggcccaatttgcagagtctgattctgggagttattcctgaaaacatcctagagcccactcctccagtccttccaactatttttttttttttgagatggagtcttgctggagtgcagtggtgcattctcagctcactacaacctctaccacccgggttcaagcgattctcctgcctcagccttccaagtagctcagactacaggtgcccaccaccacacccagctaatttttgtatttttagtagagacagggtttcaccatgttggccaggctggtctcaaactcctgacctcaagtgatctgcccgcctcagcctcccaaagtgctgggattacagttgtgagccacaacgccaagcccaactattctttttacttcccgcccccaagctttttttttttcttttttttttttgagacagagtcttgctctgtctcccaggctggagtgcaatggtgcgatctcggctcactgcaacctccacctcccaggctcaagtgattctcctgcctcagcctcctgagtagctgggattacagtcacccaccatcatgcccagataatttttgtatttttgtagggatggggtttcaccatgttggccgggctggtcttgaactcctgacctcaggtgatccacccgcctcagcctcccaaagtgttggggattacaggcatgagccactgcacctggccccatttttttaagcgtctggttccctgtattaaatccctttctgctcgattagagtgacttctgtttcctgtgactgatccccgatgataaatagcaccatgggatacagtgtcctcaaagagaggctatggcatgtcattttgttagagctgatgtgcggccaaactataataataatatactcctagaaagccagaattgaaagcacctttgagatcgaccagtccaacgccttcattcgacaaagaaggaaacgaaggcacaaggaggaagacataaaaaccacgaggccgagtgcctacagctccctcagtcgcctcctgaggccagtggacctgagctgacctggcttcatgaaatcactgtgatctaggtcacgtaagtccaatgaggccagccctgccaacctcactgtagctgactggacacaggatttgggcccgagccatttgctgccttggacaagctggatgtgatggaggccaatgcctgtgtgagactgtctggtatgggagacatcgatgctgggaacatgcccagagggcatggggccagagcacaagtctatcccagttcctgttctccggggacttgctggacgctgctgagagggcttccccaataacctcacttcctctgtgtccttattgtagccaccatcactgaaagtcctctgagcctggctcttccttgcatacctaaaggagctcgagaacatacccaaacgtggcccttgatttttctgggaatcacatagctagatcaaaaaaagaagtagccggcacagtggctcatgcctgggattacccagcattttgggaggctgaggcgggccttggagatcaggagttcaagaccagcctggccaacatggtgaaaccccgcctctactaaaaatacaaaaattagctgggtttggtggtgcacgcctgtaatcccggctactcgggaggctgaggtaggagaatcgcttgaacccggaggttgcagtgaactgagattgaggcacagtactccaacctgggcaacagagtgagactctgtctcaaacaaacaaacaaaaaagaacgagtttccttctcaaaagggatggtcttcagaatgagaagatataaaatgcctgttccaaaacagatggctgataaatatcagtcttctcctccccttccttgctgtgcggtttcagtcctctgaggccacatgtgacatcactctgagatgttacaaggctaaagaacacaaccaaagcaaacctgaattgcctggaattccaaatgagtagagactgctttctcctggggttcctaagctgagaagatgtaagcatgaatcttccagagaacagagactacctaatattgcaactcacagaggaatgtggagctgagaaattgaaaaagaaagagaaagaaacaccatttgattacactagatgacatcattttaatgccaggatctaaccatgcctaaagcccctgaacgtttcagtaacataatccaacaaatgtctttccccttatccaaagcccatttcagttaggattctgtcatctgtaactaaagaagttgactaatacaggaagtgggatactcctagtgctggcccctcacacttggagttggctgagttgaggtgggttatagaatggtgaggatttcccaatcccaggctgggaggcgggtgtaccctgagatgcagctgcacatccagagtgtcctgaaactcagatcatgcacccagcagaggtgggaactttagagggcttcacagaaatacgtcaatgtgctggctattttcccaaatcttcaattcagagtccagaaatagacaaattttgcagagaaaataataataaaagctaacatttggcctggcacggtggctcacacctgtaatcccagcactttaggaggcgaggtgggtggatcacgaggtcaggagatcaagactatcctggccaacatggtgaaaccccatctctactaaaaatacaaaaaattagctgggcgtggcggcacgtgcctgtagtcccagctactcaggaggctgaggtaggagaatcgcttgaactagggagtcagaggttgcggtgagccgagatcgcgccactgcattccagcagcctggcgacagagcaagactccgtctaaaaaaaaaaagctaacatttatgagacactcactatgtgccagacactatattaagacctttacacatattaattcatttattatttttcttttctttttaaataaaatgagatgggggtctcgctgtgttggccaggctggtctcaaactcctgagctcaagtaatcctcccacctcggcctcccaaagtgctgggattacaggcgtgagccaccatacccggcccatgtaatccttaaaataacataaataagtgggtactattttattttccattttacatttgaggaactgaagcacagaataattgcccaaagtcttacagctagatggccgttgagctatgaacttgaatccaggcagcctggcccctgagcttgtgctcccacagctctgctcagagaggctgcccatagccaacaatccaagctgattcagtgtccgatgatcgtgtgctttgcaggactgaaaatgctcatcttggccagccacggtggctcatgcttgtaatctcagcactttgggaggccaaggcgggcagatcacaaggtcaggagtttgagaccagcctggccaacatggtgaaacccagtatctactaaaaatacaaaaattagctgggcatgatggcagttgcctgtaatcccagctactcgagaggctgaggcaggagaattgcttgagcctgagaggtggaggttgtagtgagccgagatcgtgccactgtactccagcctgggcgacagagggagactctgtctcaaaaaaaaaaaaaacaaaaaaacaaaattgctcatctgttcatgtcaaagttaaagtgaatgggagcaaaggcagggaggcaggaaacacacccctcccaagcccttctgacctgtcccactaagaggaaaatgacccttatgtaaagagccttccacacagtgagagcagccagctgtgcccccacccccatgcctggtgttcacattgctccaaggcagaggtgaagacagaagccttagggatctgagtactgggaggtttccgttgctaagagagacatcctccctctccctagcaaatcaagatcaaagtctagattcagggaccataatttacaattcttctgactcagttattagcccatggtcttacccaaatgcaaataagtcagaaaccttacatgtctttttattttattttactattatttttattttaaaaatttttttagagacagggtctcactctaccacccaggctgggtgcagtggtacaatcacggctcactgcagccttgacctctaggtttaagcaatcttcctgccttgacctcctgagtatctaggactacaggtgtgtgccaccatgccagatttttttactttttgtagacacagggtctcactacattgcccaggctggtcttgaactcctggcctcaagcgatcttcctgcctcagcctcctaaagtgttgggattacagatgtgatccactgcgcccggctaaacttacacatcttttaatagagtggtcttgccagagaaaccccaatcctggcaagtggaagcctgtgactgctgatcaaccgctaaggcaatgtcttggccccaaagagtacccacaggaaatcctcaaaacccttctacggtgtggccgcagaattacagtgggtaggggagtccctccaccaaggtaaagcagccagactggccctgctctattgaggcaggaaatacttgctgttcttcatgtaatgcacaccgtggaccactgagtgttctccttctcccgttttccaaatggggttgcttatttgtaattatcttgttttccctccaccaatgcatcaaggtattttaagcttattagtatttatctatagcagtgtctcccaaacttcttgatctcaggactctattatgctgttaaaaattattgaaggccaggcacagtggctcacgcctgtaatcccagcactttgggaggccgaggtgggcagaaaacttgaggtcaggagttcaagaccagcctggctaacatggtgaaaccccgtttctactaaaaatacaaaaaattagccgggcgtgatggcaggcacctgtaagcccagctactcaggaggctgaggcaggagaattgcttgaacccgggaggcggaggttgcagtgagttgagatcatgccattgcactccagccggggtgacaagagagaaactccatctcaaaacaaaattattgaagacttaaaagagcttttgtttatgtgggttttattattgatatttgccatattataaattaaaattggccagacatggtggctcacacctgtaatcccagcactttgggaggctgaggtgggcagatcacttgagcccaggagtttgagaccagcttgggcaacatgacgaaaccctgtccctacaagaaatatagaaattagctgggcgtggttgtgcacacctgtagtcccagctactcaggaggctgaggtgggtggatctcttgagtccaggaggtcaaggctgcagtgagccattattacaccactgcattccagcatgggcaacagagtgaaaccctgtcttaaaaagaaaaaagttaaaattaagaatttttaaaatatttatttaaaaataaaaagactcattaaattaatgttaacataaataaaacattgttaaatttaaaaaaacccctacatttccaaacaaaataattagtgagaaaaatggcattgttttacatttttacaaatctttttaattctgggttaatgaaatgcagctaaatttccatatctacttcttcatttgatctgttgaaatatggtgttttggttgaagcgtatgaagaaattcagtctcacacagataactagaaaaggtgggcgtataggcacatgccctcttattgcactccactttatttttttattcacggatattgcatttcttacaaactgaaggtttgtggcaacttcatcaagcaaatctatcggagccatgtttccaacagcacatgctcacttcatgtctctgtgtcacattttggtaattcttacaatatttcaaattttttcattatgattgtatctgttatggtgatctgtgatcggtgagctttgatgtcactatcatgcagttatgtgttgcttcacaatgggcatgtattctgagaaatgcatcattaggcaactttgttgttgtgccaacatcatagagtatacaaacctaggtggtagagccgattacacacctaggctatatggtatggcccattgtgcctaggttacaaacctgtacatcacgttactgtactgaatactgtggacagttgtaatacaatggtaataatttgcatgtctaaacatagaaaatgtacagtaaaaacacagtattaggatctcacgggaccacaatgtggtccattgttcactgaaacatcattacgcagcacataactgtaaccattttggggcaccatgaaccacgcacatatcagatggagaacttaattgatacatatcgtgtgtgttctgactgctccactgaccagcgttcccccagctctcttcctctccttgagcccccctattccctgagtcaaaacaatattgaaattgggccaattaataaccctgcactggcctgtaagtgttcaagtgaaaggaagaatcacacttctctcactttaaatcaaaaactagcaatgaatggccaggcacagtggctcatgcctgtaatcccagcactttgggaggccgaagcgggcagatcacgaggtcaggagatcgaggccatcctggctaacacggtgaaactccatctctaataaaaatacaaaaaattagccgggcgtggtggcgggcacctgtagtcccagctactggggaggctgaggcaggagaatggcctgaacctgggaggcggagcctgcagtgagccgagactgcgccactgcactccagcctgggcaacagagggagactctgtctcaaaaaaaaaaaaaaaacaaaaaaaactagcaatgattaagcttactgaggaaggcatgttgaaagccgagacaggccaaaagataggcaggccccttgcgccaaacagccccactgtgaatacatagaaaacgttcttgaaggaaattcaaagggctactccaatgaacacatgaatgataagaaagtgaaacagacttgttgctaatatggagaaagtttgagtggactgggtagatcaaaccagccacaatattcccttaaaccaatgcctaatccagagaaaggccctaactctcttcaattctgtgaagcccgagagagagatggaagctgcagaagaaaagtttgaagctagcagagaatggttcatgaggtttaagggaaaaagccatcttcataacataaaaatgcaggtgaagcagcaagtgttgatatagaagttgcagcaagttatccagaagatccagctaggatcattgatgaatgtggctacactaaacaacagatttcggtgtagacaaaacagccttttattggaaggagatgtcatctaggactttcatagctggagaggagaagtcaatgcctggcttcagaccttcaaaggataggctatcttattggaggctaatgcagctggtgactttaagctgaaatcaatgctcatttaccattccaaaaatcctaggacctttaagaattgtgctaaatctactccacctgtgctctataaatggaatgacaaagcctggtgatagcacatctgtttacagcattgtttactgagtattttaaccccctgttgagacctcctgctcagaaaaaaaaaaaaaaaaaaaaaagatccatttcaaactattacagcttattgacaatgtacctggtctcccaatagttctgatggaaaggtgtgaggagagtaatgttgttttcatgcctgctaacagaacatccattctacagcccatggatcaaggagtaattttgattttcaagtcttattatttaagaaatacatttcaaaaggctgtagctgccatagacgttgattcctctgatggatctgggcaaagtaaattgaaaaccttctggaaaagattcaccattctagatgctactaagaacattcatcattcatgggaggaggtcaaaatatccacactggccgggcacggtggctcatgcctgtaatcccagcactttggaggccgaggtgaacagagcacctgaggtcgggagttcaagaccagcctgacaaacatggagaaaccccgtctctactaaaaatacaaaaattagccaggcatggtggcgcatgcctgtaatcccagctactcaggaggctgaggcaggagaattgcttgaaccttggaggcggaggttgcagtgagccgagatcatgccattgcactcctgcctgggcaacaagagtgaaactccttctcaaaaaaaaaaaaaaaaaaaaaaaaaaaaaaatccacattaacaggagtttggaagaagttgatgccaactgtcatgatgactttgtgggttcaagacttcagaggaaggtggcctggcgcggtatctcacgcctgtaattccagcactttgggaggctgagacgggtggatcacaaggtcaggagttcgagactagcttgaccaacatggtaaaaccccgtctctactaaaagtacaaaaattagccaggcatggtgtcacgcgcctgtcatcccagctactcaggaggctgaggcaggagaatctcttgaacccgggaggtggaggttgcagtgagctgagattgcaccattgcactctagccttgtgacagagtgagactccatctcaaaaaaaaaaaagaatcacttgaactggggaagtggagctgcagtgagccaagatcacaccactgcactccggcctgggcgacagagccagactctctctcaaaaaaaaaaaaggccgggcacagtggctcactcctgtaatcccggcactttgggaggccgaggagggcagatcacgaggtcaggagatcgagaccatcctggctaacacgatgaaaccccgtctctactaaaaatacaaaaaaattagccaggcttggtggcgggcgcctgtagtcccagctactcgggaggctgaggcaggagaatggcgtgaacctgggaggcggagcttgcagtgagccaagatcgcaccactgcactccagcctgggcgacagagcgagactccatctcttaaaaaaaaaaaaaatacaaaataaggtcttagtattattatgaaaataactgacttcacagaccctctcaaggtcctggaaccttcgggaatttgcagatcacatgtggagaactgctgatgtaatgctttattctttgcagatcacatgtggagaactgctgatgtaatgctttattcatcagttaatatttatcaagtgtctaccgcattcctgacagttccaggctctgagtattgggtggtgcactgtacacaagatccgtaaggcctctgctctcagagaaccaaaattcttgtagatagaagcagaaaatgaataaataaatgaataagattatttcatctacagaaatgtgccttgaagaaaataaaacaggataatttaatagagaatggcttatgggaaatttatcttcagtggttcaatatgatatccactctcccttgtgcctgtttaaatttaaattaaatcaaataattcagtttctgagtcacactaggcacatttcaagtgctcaataaccatatgtggctagtggctaccatattgtacagtgcagataaaggacacttccctcattacagaaagttctattgaacagcactgattgagtctgtgtgagacagaaagctcagtgaggattgagggcagagtactgaaggcagagggatgcaaaggcaaagatcctaagatggaaaccacttgggtgtgttgaaagaaaaagagagacagcagtgtggccgaagtgtggtaattaaagaggggactggagggctacgatatgagagaggtgggtgggagccagagcatgctggaaattgtgggccttggtgaagacttacagagcccagtaaaagcaggcattgatatgacttgattgatgtttttgaaaaatcactctggctgctacatggaaaatgaattgtagaggtggaggtagaggtaccagttaggaggctgctggatgaagggagtgatgacggaaatggagagaagctgtttgatttcataggtattttggaactagaacagcaggacttgcaggtggatagaatgtaaagaacgagaaaaagggaggaatcactaatggcctttaggcctttggcttgagcaactatatagatgatagtgccaattactgaaaagaggaagaatgaattcaggggcatggaactaagagctcttcttgggggttttacattcagatggccattaggcattcaggtagagatgacaagtaggcagttgggtacacacatttggaacatggaagtcagagctggagatacataaagttggccctccatatctgtggattcaactaattgtagataaaaaaaaatctatctatctatctatctatctatctatctatctatctatctatacatatattttttaagacagagtctcaggccaggcatggtggctcacgcctgtaatcccagcactttgggagggcgaggcgggcagatcatgcggtcaagagattgagaccatcttggctaacacggtgaaaccccatctctactaaaaatacaaaaaattagccgggcatggtggcagatgcctgtagtcccagctcctggggaggctgaggcaggagaatggcctgaacccgggaggcagagcttgcagtgagccaagaccgcgccacggcactccagcctgggcaacagagcaagactcactctccaaaaaaaaaaaaaaaagcagcatgttttaagcaggagaaagtggtcattttggttgaccattgctgacaggttaaggtgacaacagactagtgtgcccactggatttggcagcatgaaagatgttggcattcttgataagagcagtttcagtggagtggtgaggttgggagcctaaagagagtgggttgaagagtgatgagatttgaggaaggaggaatgaagtggggaaaaccagtagtagctggagggcaagtagagtcaagggaagttttgttgtttcatgttgtgttgttaagatgtaaatatataacatgtttatgtattgattggaatgctctattggagagagagagattatctggtgttgcaggagaaaaagcatgtagttgcagaagcaaagcccttgacaaggtgagagttagccttagaaagtagcgagaggacttcatttatggtaacagggaagaaggcagagagtgtgggttcctgtctggttgtggtgatacaatcgtaaacaatgctgctctgaacattcatatacaaattttcgtatgaatatgtcttcagttctcttgagaatatacctaggaatgaaattgctgggtcatatgataactctatgtttgttcgttttttcttttttctttttttcttttttttggagacagggtggctctgtcgcctaggctggagtgcagtggtgggatcacggcttactacagccttgatctccggggctcaagtgatccttccacctcagcctcccaaggagctgggaccacggctgcatatcacccatacctggctaatttttaaatttttttgtagagatggggtctcactatgtggcccaggcttatgtttaattttttgaggaactgccatatggttttccaaagtgctcgcactgtttcacattctcatcagtagtatgtgagggttccaatttctccacatcttcaccagcacttgttattgtctgtctttctggttatagccatgctagtgaatatgaagtggtatcttattgtagtttttatttgtatttccctatcgacgaatgatattgagcatcttttcctatacttcttagccatctatgtttcttgtttggataaatgtttattaaaatcttttgcctctttttcagttgggttatttgtccttttgttgttgaatcgtaagacttttttgtgtattttggatactagatgtctatcagatgtatgacttgcaaatatttttgatgggttatctttttactttcctgatagtgtcctttgaagcgcaaaagtttttaatttcaaagaaatcataattacctatttttctttggttgcttgtgcttttagtgtcataagtaagaaatcattgtctgatccaaggtcacaaagacttacgtctatgttttcttaaaagagttttatagttttagctcttacatttaggtctttgattcagtttgagtgtatttttgtacatagtatgagttaggggtccagcttcatccttttgcatgggatacccaattgtcccagctccatttgttgaaagactattatttctcccttgaatcatcttggcatccttgtcaaaactcagttaaccaaggccaggcatggtggctcacacctgtaatcccagcactatgaaaggccaaggaaagaggatcacttgaagccaggagtttgcgaccagcttgggcaacataatgagactttgtctgtacaaaaaaaaaataataataattgtttaaattagctgagcgcagtagtatgcaccgagagtcttaggtacttgggaggttgaggcggaggattgcttgagcccaggaattcaaggctatagtgacctatcatcaagccatagcactccagcctgggcaacagagcaaccctgtctccaaaaaactgaaaagaaaaagatcaattgaccatgtgtgtatttttattcctcgtttatttctggtttctttatttttggactctcagttctattccattgatccatatgtccatccttatgtcagtaccacattgtcttgattattttaactttattgtaagttagaattgggaagtgtgagttcttcaacttttattttctttctcaggattgttttgattattctgtatcttctgtatttccatataaatttaggatcagtttaccaatttctgcaaaaaaaggcagtttttattttttaactagtttattttagatttagggggtacatgtgcttgtagttacatgggtatatagcatactgatggggatcaggcttctattgtacccagtgtccaaatagtgaacattgtacctgacaggttatttttcaactctcacccctctctcaacctccctccagagcagcttggattttgatagggattatattgaatctgtagatcaatttgggagaattgccatcttaatgatattaagtcttccaatttatgaacttaggatgtctttctatttacttaggtcttctttaatttcttttttttttttttaagagataagatctcactctgttagctcactgtgaactcctgggctcaagcagtccttccacttcagcctcccaagtagctaggaccacaggtgccaccacacccagctaattcgtgggggagggagggtagagatggggtctccctatgttgccctggctggtctcaaactgaactcaaatgatcctcccaccttggcctcccacagtgctgggattacaggcatgaggcagtgtgcctggcctttcatttctctcatgttactggttttaagcagaagaatatcatgatttgatttatacttaagaagattactcagtagtggccgggtgcggtggctcatgcttgtaatcccagcactttgggaggctgaggcgggcagatcataaggtcagcagttcgagaccagcctggccaacacggtgaaaccccgtctctactaaaattacaaaaattagttgggtgtggtggcgggcacctgtaatcccagctactcaggaggctgaggcagaagaatcgcttgaacccgggaggcagaggttgcagtgagtcgagaccaccccattgcactccagcctggggtacaggctggggtgcagacagagtgagattctgtctcaaaaaaaaaaaaaaggaagattactcagtagtgtggaaaaataattggtgggcaaagagacgctacatgaacaagggcagagacaaagaggaagtcactcattacataaatatttatggacgggacttggtgattgactttatgtagaaagaaagggaagagtaaagaacaactcccaggtttgggcttcggtacatcacgacgccaccaattgagataggaaaacacagtttggggggaaagatgaagtgatcagtttgtgcctgctgagcttcaggtggtgaagggacacccaggtggaaaggtaaggtagttggatatctgagtccaatgctaagaggagaatctagtctgggaatagtgatttgacactcatcatataaaaggagagctgtgagagtgcacaagccaactgatgggaaaagtaaaggaagcagaaaggatacacagaaaaactaggaattccaagggtgagctgatgacaaaaagtccacaaaaggagactgagaaggaacaaccagagaggcaggaggaagctccagaaagagatgcagggagagtggctaataataacaacttaaggactgaaatgcttccatcggaattagccaaattagaagtcactggtgaccctggcaacgactcttttgctgaagctgaagccacgctgctatgaactgaagaggaagtgggagttgggaaggtggagacagcaaataaagataactcattccagaggtttgcagggagaaaggaaaagaagtgaaaaagcagtaactaggaatgtaaagagggtcaagaggaggttgtgctttttaggacaaaagagacttgggtgagtttgtaggctgaggaacgaaagcagatgaaagggagaggatgagggatggagagtccttgtagagctgggaggaataaggagggagaggattgattttatttatttttcttttaaccctgcttgattctatactgatttttaaaatttttttatatgggccgggtgcagtggcttgcacctgtaatcgcagcacttggggaggccgaggtgggtggatcacctgaggtcaggagttcaagaccagcctggccaacatggcgaaaccccatctctactaaaaatacaaaaattagccaggcgtggtagtgggcacctgtaatcccagctactcaggaggctgagacaggagaatcgcttgaacccaggaggtggatgttgcagtgagccgagatggtgccaactgcactccagcctgggtgacagggtaagacgccgtctcagaaaaaaaaaaaaaaaaaaaaattctatggaggtgagaggacttagaacagtgctcttctgacgttaatgtgcatatgagttacatatctcaaatctcccctctctccatcttgacagctaccattctggtccaagtccaagtccccctacaggcctcatctctcactgggacaactgagctggacttcagacgctcaaccctgtggtttaggcttggtggtgaagaggccaggacagggctaactgaatggaagaaaacagaaggggccggcatggggagtctgaatacgggcatgctgctggggagaacttggtgatgcttgaggttgggatttcagagaaggctgttctaggcgtggctctggagagaatagctacagtcatgtgaaggccactgaggatggcaaggaagggccctgggacattcacacggatgagcaggatattaggacagaaacccaagtcccggatggatgaagggaggtgacagggaagatagaagatgaaggtgatggggaggcacagcagagtagagccaggcagcagaagtctcagaggagaaagaaaaagataacatatgcgcacagaaaacaaaacaaaacaaaacataaagccaggcacacgcctataatcccagcactttgggaggctgaggtgggaggattgcttgaggccaggagttcgagaccagcctgggcaatatagtaagatcttgtctctacggaaaaaaaaaaaaaaaattagcctggtgtggtggcatgtgcctgtggtcccagctacttgggagactgaggtgggaggactgcttgagtctgggaggtagaggttgcagtgagtcgacattgagccattgaactccagcctgggcgacagagtgagactctgtctcaaaaaaaaagaggcggggggtggggggtcattgtggctcacacctgtaatcccagcactttaggaggccaaggcaggcagatc

SEQ ID NO: 252 - DNA, 1832 bp, Homo sapiens
  JUNB
gagcggccaggccagcctcggagccagcagggagctgggagctgggggaaacgacgccaggaaagctatcgcgccagagagggcgacgggggctcgggaagcctgacagggcttttgcgcacagctgccggctggctgctacccgcccgcgccagcccccgagaacgcgcgaccaggcacccagtccggtcaccgcagcggagagctcgccgctcgctgcagcgaggcccggagcggccccgcagggaccctccccagaccgcctgggccgcccggatgtgcactaaaatggaacagcccttctaccacgacgactcatacacagctacgggatacggccgggcccctggtggcctctctctacacgactacaaactcctgaaaccgagcctggcggtcaacctggccgacccctaccggagtctcaaagcgcctggggctcgcggacccggcccagagggcggcggtggcggcagctacttttctggtcagggctcggacaccggcgcgtctctcaagctcgcctcttcggagctggaacgcctgattgtccccaacagcaacggcgtgatcacgacgacgcctacacccccgggacagtacttttacccccgcgggggtggcagcggtggaggtgcagggggcgcagggggcggcgtcaccgaggagcaggagggcttcgccgacggctttgtcaaagccctggacgatctgcacaagatgaaccacgtgacaccccccaacgtgtccctgggcgctaccggggggcccccggctgggcccgggggcgtctacgccggcccggagccacctcccgtttacaccaacctcagcagctactccccagcctctgcgtcctcgggaggcgccggggctgccgtcgggaccgggagctcgtacccgacgaccaccatcagctacctcccacacgcgccgcccttcgccggtggccacccggcgcagctgggcttgggccgcggcgcctccaccttcaaggaggaaccgcagaccgtgccggaggcgcgcagccgggacgccacgccgccggtgtcccccatcaacatggaagaccaagagcgcatcaaagtggagcgcaagcggctgcggaaccggctggcggccaccaagtgccggaagcggaagctggagcgcatcgcgcgcctggaggacaaggtgaagacgctcaaggccgagaacgcggggctgtcgagtaccgccggcctcctccgggagcaggtggcccagctcaaacagaaggtcatgacccacgtcagcaacggctgtcagctgctgcttggggtcaagggacacgccttctgaacgtcccctgcccctttacggacaccccctcgcttggacggctgggcacacgcctcccactggggtccagggagcaggcggtgggcacccaccctgggacctaggggcgccgcaaaccacactggactccggccctcctaccctgcgcccagtccttccacctcgacgtttacaagcccccccttccacttttttttgtatgttttttttctgctggaaacagactcgattcatattgaatataatatatttgtgtatttaacagggaggggaagagggggcgatcgcggcggagctggccccgccgcctggtactcaagcccgcggggacattgggaaggggacccccgccccctgccctcccctctctgcaccgtactgtggaaaagaaacacgcacttagtctctaaagagtttattttaagacgtgtttgtgtttgtgtgtgtttgttctttttattgaatctatttaagtaaaaaaaaaattggttctttaaaaaaaaaaaaaaaaa

SEQ ID NO: 253 - DNA, 595 bp, Homo sapiens
  STX2
  modified_base (471)..(471): a, c, t or g
  modified_base (505)..(505): a, c, t or g
  modified_base (548)..(548): a, c, t or g
atgcttctctggaaatttttaatgtaaacatgaaatatttgaagaaccgattaaaaagtctcaagtgaatctgtaaatacatttttaagtctgacttcaaatcggtacatgaggcttagacatacacatcattggacaagtgacttaaatatctaaatacaaatcaaatagcattttcctaacttcaactataaaaacacaaatttcagtaggtactgcaaatctaagaagaataacttgaaaaataccataataagtgttgtaaaaggggaggactcatatgacagaccttgaaggaaaggtgggacatcacgggaggcaggtccccctgtggacatgattccacagaggcgtggagtccttttgccaccagcatgatcctgaaatattgaaaaccctcaagacaagtgataccttcaacatagccacaaatcagtgagcacatcccacgacaggggtgtttaaagaccnaaagaaaaagaacagtcagaggcagaattccccnagtaactggccacacagtgaccaccagcgagtgatcccatggncgcatctggatgagggagatcggaatgtgttaagtaaggacgcgctt

SEQ ID NO: 254 - DNA, 4606 bp, Homo sapiens
  KIAA0388
ggacacctgttctgctgttgtgtcctgccattctcctgaagaacagaggcacactgtaaaacccaacacttccccttgcattctataagattacagcaagatggaaataccaaatccccctacctccaaatgtatcacttactggaaaagaaaagtgaaatctgaatacatgcgacttcgacaacttaaacggcttcaggcaaatatgggtgcaaaggctttgtatgtggcaaattttgcaaaggttcaagaaaaaacccagatcctcaatgaagaatggaagaagcttcgtgtccaacctgttcagtcaatgaagcctgtgagtggacacccttttctcaaaaagtgtaccatagagagcattttcccgggatttgcaagccaacatatgttaatgaggtcactgaacacagttgcattggttcccatcatgtattcctggtcccctctccaacagaactttatggtagaagatgagacggttttgtgcaatattccctacatgggagatgaagtgaaagaagaagatgagacttttattgaggagctgatcaataactatgatgggaaagtccatggtgaagaagagatgatccctggatccgttctgattagtgatgctgtttttctggagttggtcgatgccctgaatcagtactcagatgaggaggaggaagggcacaatgacacctcagatggaaagcaggatgacagcaaagaagatctgccagtaacaagaaagagaaagcgacatgctattgaaggcaacaaaaagagttccaagaaacagttcccaaatgacatgatcttcagtgcaattgcctcaatgttccctgagaatggtgtcccagatgacatgaaggagaggtatcgagaactaacagagatgtcagaccccaatgcacttccccctcagtgcacacccaacatcgatggccccaatgccaagtctgtgcagcgggagcaatctctgcactccttccacacacttttttgccggcgctgctttaaatacgactgcttccttcacccttttcatgccacccctaatgtatataaacgcaagaataaagaaatcaagattgaaccagaaccatgtggcacagactgcttccttttgctggaaggagcaaaggagtatgccatgctccacaacccccgctccaagtgctctggtcgtcgccggagaaggcaccacatagtcagtgcttcctgctccaatgcctcagcctctgctgtggctgagactaaagaaggagacagtgacagggacacaggcaatgactgggcctccagttcttcagaggctaactctcgctgtcagactcccacaaaacagaaggctagtccagccccacctcaactctgcgtagtggaagcaccctcggagcctgtggaatggactggggctgaagaatctctttttcgagtcttccatggcacctacttcaacaacttctgttcaatagccaggcttctggggaccaagacgtgcaagcaggtctttcagtttgcagtcaaagaatcacttatcctgaagctgccaacagatgagctcatgaacccctcacagaagaagaaaagaaagcacagattgtgggctgcacactgcaggaagattcagctgaagaaagataactcttccacacaagtgtacaactaccaaccctgcgaccacccagaccgcccctgtgacagcacctgcccctgcatcatgactcagaatttctgtgagaagttctgccagtgcaacccagactgtcagaatcgtttccctggctgtcgctgtaagacccagtgcaataccaagcaatgtccttgctatctggcagtgcgagaatgtgaccctgacctgtgtctcacctgtggggcctcagagcactgggactgcaaggtggtttcctgtaaaaactgcagcatccagcgtggacttaagaagcacctgctgctggccccctctgatgtggccggatggggcaccttcataaaggagtctgtgcagaagaacgaattcatttctgaatactgtggtgagctcatctctcaggatgaggctgatcgacgcggaaaggtctatgacaaatacatgtccagcttcctcttcaacctcaataatgattttgtagtggatgctactcggaaaggaaacaaaattcgatttgcaaatcattcagtgaatcccaactgttatgccaaagtggtcatggtgaatggagaccatcggattgggatctttgccaagagggcaattcaagctggcgaagagctcttctttgattacaggtacagccaagctgatgctctcaagtacgtggggatcgagagggagaccgacgtcctttagccctcccaggccccacggcagcacttatggtagcggcactgtcttggctttcgtgctcacaccactgctgctcgagtctcctgcactgtgtctcccacactgagaaaccccccaacccactccctctgtagtgaggcctctgccatgtccagagggcacaaaactgtctcaatgagaggggagacagaggcagctagggcttggtctcccaggacagagagttacagaaatgggagactgtttctctggcctcagaagaagcgagcacaggctggggtggatgacttatgcgtgatttcgtgtcggctccccaggctgtggcctcaggaatcaacttaggcagttcccaacaagcgctagcctgtaattgtagctttccacatcaagagtccttatgttattgggatgcaggcaaacctctgtggtcctaagacctggagaggacaggctaagtgaagtgtggtccctggagcctacaagtggtctgggttagaggcgagcctggcaggcagcacagactgaactcagaggtagacaggtcaccttactacctcctccctcgtggcagggctcaaactgaaagagtgtgggttctaagtacaggcattcaaggctgggggaaggaaagctacgccatccttccttagccagagagggagaaccagccagatgatagtagttaaactgctaagcttgggcccaggaggctttgagaaagccttctctgtgtactctggagatagatggagaagtgttttcagattcctgggaacagacaccagtgctccagctcctccaaagttctggcttagcagctgcaggcaagcattatgctgctattgaagaagcattaggggtatgcctggcaggtgtgagcatcctggctcgctggatttgtgggtgttttcaggccttccattccccatagaggcaaggcccaatggccagtgttgcttatcgcttcagggtaggtgggcacaggcttggactagagaggagaaagattggtgtaatctgctttcctgtctgtagtgcctgctgtttggaaagggtgagttagaatatgttccaaggttggtgaggggctaaattgcacgcgtttaggctggcaccccgtgtgcagggcacactggcagagggtatctgaagtgggagaagaagcaggtagaccacctgtcccaggctgtggtgccaccctctctggcattcatgcagagcaaagcactttaaccatttcttttaaaaggtctatagattggggtagagtttggcctaaggtctctagggtccctgcctaaatcccactcctgagggagggggaagaagagagggtgggagattctcctccagtcctgtctcatctcctgggagaggcagacgagtgagtttcacacagaagaatttcatgtgaatggggccagcaagagctgccctgtgtccatggtgggtgtgccgggctggctgggaacaaggagcagtatgttgagtagaaagggtgtgggcgggtatagattggcctgggagtgttacagtagggagcaggcttctcccttctttctgggactcagagccccgcttcttcccactccacttgttgtcccatgaaggaagaagtggggttcctcctgacccagctgcctcttacggtttggtatgggacatgcacacacactcacatgctctcactcaccacactggagggcacacacgtaccccgcacccagcaactcctgacagaaagctcctcccacccaaatgggccaggccccagcatgatcctgaaatctgcatccgccgtggtttgtattcattgtgcatatcagggataccctcaagctggactgtgggttccaaattactcatagaggagaaaaccagagaaagatgaagaggaggagttaggtctatttgaaatgccaggggctcgctgtgaggaataggtaaaaaaaaacttttcaccagcctttgagagactagactgaccccacccttccttcagtgagcagaatcactgtggtcagtctcctgtcccagcttcagttcatgaatactcctgttcctccagtttcccatcctttgtccctgctgtcccccacttttaaagatgggtctcaacccctccccaccacgtcatgatggatggggcaaggtggtggggactaggggagcctggtatacatgcggcttcattgccaataaatttcatgcactttaaagtcctgtggcttgtgacctcttaataaagtgttagaatccattttg

SEQ ID NO: 255 - DNA, 1500 bp, Homo sapiens
  CDK6
cggagggtggggagcggaaagcaggacgcacggctcccgcggcccgctggctgcccttcccgccagcgcaggtgtgggacgggcggcggactaggcacagagctgcgggagcaggcacagggagtgtggagcctggcggcgggacggcgggatccggtgggagccggagtcccgccgaggggggctggaggtggaggggcccggcgaggccgcgatgaagccgagcggcgaggaccaggcggcgctggcggccggcccctgggaggagtgcttccaggcggccgtgcagctggcgctgcgggcaggacagatcatcagaaaagcccttactgaggaaaaacgtgtctcaacaaaaacatcagctgcagatcttgtgacagaaacagatcaccttgtggaagatttaattatttctgagttgcgagagaggtttccttcacacaggttcattgcagaagaggccgcggcttctggggccaagtgtgtgctcacccacagcccgacgtggatcatcgaccccatcgacggcacctgcaattttgtgcacagattcccgactgtggcggttagcattggatttgctgttcgacaagagcttgaattcggagtgatttaccactgcacagaggagcggctgtacacgggccggcggggtcggggcgccttctgcaatggccagcggctccgggtctccggggagacagatctctcaaaggccttggttctgacagaaattggccccaaacgtgaccctgcgaccctgaagctgttcctgagtaacatggagcggctgctgcatgccaaggcgcatggggtccgagtgattggaagctccacattggcactctgccacctggcctcaggggccgcggatgcctattaccagtttggcctgcactgctgggatctggcggctgccacagtcatcatcagagaagcaggcggcatcgtgatagacacttcgggtggacccctcgacctcatggcttgcagagtggttgcggccagcacccgggagatggcgatgctcatagctcaggccttacagacgattaactatgggcgggatgatgagaagtgactgcggctgaggcaaagctgctcccaaggcctccctgggctgctgtgggctcctggggaggtggccctcgtggcccacgctccatgccagtggctcacgctctgctcctggctaccccagagggagttgtcacgctacagtgagtggctggccttttaaatcgacgtctctctcaccaggatttggtgtttagctgtttctctctttaatctcacgtagcctttttcaggttagtacgtgttcttctgtcagggccaaaactcaaatctcctgtgaaatacgtattgataatccaatcttgatttttccccccagaatataaatctcaggtaataaggctttagaactgctgataaagcggatcgttctcaggccctccccccggagtacttcagaatgcaataaatcaaaataatggc

SEQ ID NO: 256 - DNA, 390 bp, Homo sapiens
  H4/g; H4FG; dJ221C16.1
atgtctggtcgcggcaaaggcggaaaaggcttggggaagggtggtgctaagcgccatcgtaaggtgctccgggataacatccagggcattacaaaaccggctattcgccgtttggctcggcgcggtggcgtcaagcgcatttccggtcttatctatgaggagactcgaggtgtgcttaaggttttcttagagaacgttattcgagacgccgtcacctatacggagcacgccaagcgcaaaactgtcacagccatggatgtagtatatgccctaaaacgtcaggggcgcactctgtatggcttcggcggctgaatctaagaatacgcggtctcctgagaacttcaaaaaacaaaaacaaaaaaacccaaaggcccttttcagggccgctca

SEQ ID NO: 257 - DNA, 3062 bp, Homo sapiens
  EVI9; CTIP1; BCL11A-L; BCL11A-S; FLJ10173; FLJ34997; KIAA1809; BCL11A-XL
  modified_base (2252)..(2252): a, c, t or g
tgacgttcaagttcgcagggacgtcacgtccgcacttgaacttgcagctcaggggggcttttgccatttttttcatctctctctctctctctccctctatctctcttctctctctctctctccctctttttttttttttttttttttttttttttttgcttaaaaaaaagccatgacggctctcccacaattcatcttccctgcgccatctttgtattatttctaatttattttggatgtcaaaaggcactgatgaagatattttctctggagtctccttctttctaacccggctctcccgatgtgaaccgagccgtcgtccgcccgccccgcagcccaccatgtctcgccgcaagcaaggcaaaccccagcacttaagcaaacgggaattctcgcccgagcctcttgaagccattcttacagatgatgaaccagaccacggcccgttgggagctccagaaggggatcatgacctcctcacctgtgggcagtgccagatgaacttcccattgggggacattcttatttttatcgagcacaaacggaaacaatgcaatggcagcctctgcttagaaaaagctgtggataagccaccttccccttcaccaatcgagatgaaaaaagcatccaatcccgtggaggttggcatccaggtcacgccagaggatgacgattgtttatcaacgtcatctagaggaatttgccccaaacaggaacacatagcagataaacttctgcactggaggggcctctcctcccctcgttctgcacatggggctctaatccccacgcccgggatgagtgcagaatatgccccgcagggtatttgtaaagatgagcccagcagctacacatgtacaacttgcaaacagccattcaccagtgcatggtttctcttgcaacacgcacagaacactcatggattaagaatctacttagaaagcgaacacggaagtcccctgaccccgcgggttggtatcccttcaggactaggtgcagaatgtccttcccagccacctctccatgggattcatattgcagacaataacccctttaacctgctaagaataccaggatcagtatcgagagaggcttccggcctggcagaagggcgctttccacccactccccccctgtttagtccaccaccgagacatcacttggacccccaccgcatagagcgcctgggggcggaagagatggccctggccacccatcacccgagtgcctttgacagggtgctgcggttgaatccaatggctatggagcctcccgccatggatttctttaggagacttagagagctggcagggaacacgtctagcccaccgctgtccccaggccggcccagccctatgcaaaggttactgcaaccattccagccaggtagcaagccgcccttcctggcgacgccccccctccctcctctgcaatccgcccctcctccgtcccagcccccggtcaagtccaagtcatgcgagttctgcggcaagacgttgaaatttcagagcaacctggtggtgcaccggcgcagccacacgggcgagaagccctacaagtgcaacctgtgcgaccacgcgtgcacccaggccagcaagctgaagcgccacatgaagacgcacatgcacaaatcgtcccccatgacggtcaagtccgacgacggtctctccaccgccagctccccggaacccggcaccagcgacttggtgggcagcgccagcagcgcgctcaagtccgtggtggccaagttcaagagcgagaacgaccccaacctgatcccggagaacggggacgaggaggaagaggaggacgacgaggaagaggaagaagaggaggaagaggaggaggaggagctgacggagagcgagagggtggactacggcttcgggctgagcctggaggcggttgtgggcgtgggcgacgagagccgcgccctgcccgacgtcatgcagggcatggtgctcagctccatgcagcacttcagcgaggccttccaccaggtcctgggcgagaagcataagcgcggccacctggccgaggccgagggccacagggacacttgcgacgaagactcggtggccggcgagtcggaccgcatagacgatggcactgttaatggccgcggctgctccccgggcgagtcggcctcggggggcctgtccaaaaagctgctgctgggcagccccagctcgctgagccccttctctaagcgcatcaagctcgagaaggagttcgacctgcccccggccgcnatgcccaacacggataacgtgtactcgcagtggctcgccggctacgcggcctccaggcagctcaaagatcccttccttagcttcggagactccagacaatcgccttttgcctcctcgtcggagcactcctcggagaacgggagtttgcgcttctccacaccgcccggggagctggacggagggatctcggggcgcagcggcacgggaagtggagggagcacgccccatattagtggtccgggcccgggcaggcccagctcaaaagagggcagacgcagcgacacttgttcttcacacacccccattcggcgtagtacccagagagctcaagatgtgtggcagttttcggatggaagctcgagagcccttaagttctgagaaaatttgaagcccccaggggtggggtggacgcgtgccgcccagtcgacgtcagcgtggtctgtcatcctgctagtttgtgatgttttctgacagtagcctccaagaagccgttgtgcgaagacagagtcctgcagagtccttccagcctaggcctgcagcgccattttatttatattttttaataaaaagtaaaaacaaaaaaacagacccacattggaacagtgaatcagtcccatagagagggcccgtggaccatcgctgtcatgagtgatgccctggcccttctgaaaccagccaacctaattacctgtattgtggaaatgcgcatgagtccccaaccccttgtttctatacattctatgttgtcttttaaaaagtgtgcttaacattgacacaataaatgttggagctttagaaaaaaaaaaaaaa

SEQ ID NO: 258 - DNA, 3415 bp, Homo sapiens
ccccctcccctcctgcagcctcctgcgccccgccgagctggcggatggagctgcgcagcgggagcgtgggcagccaggcggtggcgcggaggatggatggggacagccgagatggcggcggcggcaaggacgccaccgggtcggaggactacgagaacctgccgactagcgcctccgtgtccacccacatgacagcaggagcgatggccgggatcctggagcactcggtcatgtacccggtggactcggtgaagacacgaatgcagagtttgagtccagatcccaaagcccagtacacaagtatctacggagccctcaagaaaatcatgcggaccgaaggcttctggaggcccttgcgaggcgtcaacgtcatgatcatgggtgcagggccagcccatgccatgtattttgcctgctatgaaaacatgaaaaggactttaaatgacgttttccaccaccaaggaaacagccacctagccaacggtattttgaaagcgtttgtctggagttagaaagttctcttcttcaacacgtccctccccagggtgttcctccctgtgacccagccgcctcgacttcggcccgcttgctcacgaataaagaactcagagttgtgtgtgcaatgcacacccagacacacgcacgcacacacacgcgcgcgcacacacatgctttttttctgttcccctccgctttctgaagcctggggagaaatcagtgacagaggcgctctctgggttttattgttatgtgggttttcttttgtattttttttgtttgttttgtttttaaacattcaaaagcaattaatgatcagacataggagaaaccctgaatagaaacaaaacttttgaatgctggattcaaaaaagaaaaaaagttatctggacagcttctttgagactatttaaaaactggtacaacaggtctctacaacgccaagatctaactaagctttaaaaggtcaagaagttttatggctgacaaaggactcgcgcaacgcagaaggcctttcccaccttaagcttccggggatctgggaattttacccccattctcttctgtttgtctgagtctcatctctctgcaagcaagggctgaaatcattttgtttggttgttttgagggagagaggcggggtgggggggtgcaaatctgccagcagctcttacgtaaggcatgttttattggggagggctgagcttttattttctcctctccagtggggttggcttttattgtttcttgtttgggtttggaatggaaatatggatagcagcataaagtacttttattttgacaaaattcatttttttcaacaatggagacatagatttgacccacaataacttctccccctctctttttactctgctcaaaaagcatctctcctcccattacccaaccttggtcataagtgtgcctggctggtttgcagatatttgttctgctttgtaaaaattggccattagtgcatttattgagatgatctctaaagagctatgccctgacctacccctgattctatgacattggggcccttcttttgctgaaactgccttacgtaatggttttactccttgaaagagatttgacggaatccattttatgccaagtgctgccctgcactgtttctgcaatatgtggtgtatgctgtggtgatcttgctgggaatgattataagtgtgtgtgtgatgggggagtgggtattacatgcattgctgaagagtcatcctggtgttcctcattcctcccaccttcccgtggtcattttaattacggggcagtgtcaccgcaaagggaggaaactcaaagccgaaagcaaaattccaggcctgattctggcttttgaggttcctggttcttgaagccaggcctgacccgactctcagatggggtcagtcccgtcgctttgcagactgaccctggaaatctacaaaatgcagattttcctgatttcctcttctcttgcccagtttttttttttttttttttttttttttttaaagcctggattgtaaccagattttcttttttcccccttctcagctgtagatatgatatctcctttcagggccccagcttaagggcaaagtgagttaatgtgtagacaaaggcgagggacaagagagagttaacatctagacagtggaaaaagccatggtgtgtggtttctgggaaccaccaacacttgcaggtttagctttttcccagggttgactacaagaaagaaaaccatgtttttgcaagattaaaatgtggttgagtgtgcctaaattaaccatccccatttttatcatatttccaccatcacttcagggttttaagagtcagtgctcacctgggcggagctggtagtacattttgcttcttagaaagctaagtcctgggttccgtctgattttaggttccaggaacttcctgagaacacccgatcgcagagggtaattttctggagtttgttttgcagggatagctgggagtatggccaccctgctccacgatgcggtaatgaatccagcagaagtggtgaagcagcgcttgcagatgtacaactcgcagcaccggtcagcaatcagctgcatccggacggtgtggaggaccgaggggttgggggccttctaccggagctacaccacgcagctgaccatgaacatccccttccagtccatccacttcatcacctatgagttcctgcaggagcaggtcaacccccaccggacctacaacccgcagtcccacatcatctcaggcgggctggccggggccctcgccgcggccgccacgacccccctggacgtctgtaagacccttctgaacactcaggagaacgtggccctctcgctggccaacatcagcggccggctgtcgggtatggccaatgccttccggacggtgtaccagctcaacggcctggccggctacttcaaaggcatccaggcgcgtgtcatctaccagatgccctccaccgccatttcttggtctgtctatgagttcttcaagtactttctcaccaagcgccagctggaaaatcgagctccatactaaaggaagggatcatagaatcttttcttaaagtcattctctgcctgcatccagccccttgccctctcctcacacgtagatcatttttttttttgcagggtgctgcctatgggccctctgctccccaatgccttagagagaggaggggacggcacggccgctcaccggaaggctgtgtgcggggacatccgaggtggtggtggacaggaaggacttgggaaggggagcgagaaattgctttttctcttcctccctgggcagaatgtagcttttctgcttcactgtggcagcctcctccctggatccttagatcccagaggagggaagaaaatttgcagtgactgaaaacagtaaaaaaaaaaaaaaaaaa

SEQ ID NO: 259 - DNA, 1874 bp, Homo sapiens
gcatttttaccaaagagcaatgtcactataacttatgaacagaaagttgtgaaatataagggtactcatggaaaccagtgaagagaggaaacaccggcaattgttcaacacggaacagtgagcaggtactttgggagtaaggctctgagagatggaagacgctggtctcagatctgaggtgatgtctggccaatcgtcttggctccaagggggaagaatgcaactggcaggattcgaggagagggcacttctgcagcccccaagcaagtctctagttttcgccccaaagtggatgcactttctaacttcagcaaggcctcctcaggaggatttgctttccgatgtgtagtagcggtacaggaaacctaagagaacagcgcctatgatgggtaaaatccaatatgcccagcaacttttgcatgtatcattttttgaagggtccttgctaccactttcaggtttaaggtcactcggatggatatcaccaatgtagtactgctttagcatttctctggcatcagaagagtgtcctacatcttcaaagctttcacttgcatctacaccagcttgttccagcagaacctcttctcctccagggtgctcgttgaggaagcgggtgacatcgtagactcgcccatggatcacaagccacagttccttcaaggagttgcgctttgccacctcctccaaccggtaataggtgactgaggtctcgacttcctgccctttcccatcgctgccgctagcttccgcagtcgccattgaaccggacatactgcctctccaccgctaactgagattccgcgactactttccttgagagcccgcgctcagccttcctcggcttccgtaacagtggagcagccaagtttgtcttcaggcacaatgaccctgaccacctaaagaaacttctagagaagtctaaccctaagatacccaaaattgtggcctttgagactgtccactccatggatggtgccatctgtcccctcgaggagttgtgtgatgtgtcccaccagtatggggccctgaccttcgtggatgaggtccatgctgtaggactgtatgggtcccggggcgctgggattggggagcgtgatggaattatgcataagattgacatcatctctggaactcttggcaaggcctttggctgtgtgggcggctacattgccagcacccgtgacttggtggacatggtgcgctcctatgctgcaggcttcatctttaccacttctctgccccccatggtgctctctggagctctagaatctgtgcggctgctcaagggagaggagggccaagccctgaggcgagcccaccagcgcaatgtcaagcacatgcgccagctactcatggacaggggccttcctgtcatcccctgccccagccacatcatccccatccgggtgggcaatgcagcactcaacagcaagctctgtgatctcctgctctccaagcatggcatctatgtgcaggccatcaactacccaactgtcccccggggtgaagagctcctgcgcttggcaccctccccccaccacagccctcagatgatggaagattttgtggagaagctgctgctggcttggactgcggtggggctgcccctccaggatgtgtctgtggctgcctgcaatttctgtcgccgtcctgtacactttgagctcatgagtgagtgggaacgttcctacttcgggaacatggggccccagtatgtcaccacctatgcctgagaagccagctgcctaggattcacaccccacctgcgcttcacttgggtccaggcctactcctgtcttctgctttgttgtgtgcctctagctgaattgagcctaaaaataaagcacaaaccacaaaaaaaaaaaaaaaaa

SEQ ID NO: 260 - DNA, 2334 bp, Homo sapiens
  KIP1; CDKN4; P27KIP1
cttgctcacggctctgcgactccgacgccggcaaggtttggagagcggctgggttcgcgggacccgcgggcttgcacccgcccagactcggacgggctttgccaccctctccgcttgcctggtcccctctcctctccgccctcccgctcgccagtccatttgatcagcggagactcggcggccgggccggggcttccccgcagcccctgcgcgctcctagagctcgggccgtggctcgtcggggtctgtgtcttttggctccgagggcagtcgctgggcttccgagaggggttcgggccgcgtaggggcgctttgttttgttcggttttgtttttttgagagtgcgagagaggcggtcgtgcagacccgggagaaagatgtcaaacgtgcgagtgtctaacgggagccctagcctggagcggatggacgccaggcaggcggagcaccccaagccctcggcctgcaggaacctcttcggcccggtggaccacgaagagttaacccgggacttggagaagcactgcagagacatggaagaggcgagccagcgcaagtggaatttcgattttcagaatcacaaacccctagagggcaagtacgagtggcaagaggtggagaagggcagcttgcccgagttctactacagacccccgcggccccccaaaggtgcctgcaaggtgccggcgcaggagagccaggatggcagcgggagccgcccggcggcgcctttaattggggctccggctaactctgaggacacgcatttggtggacccaaagactgatccgtcggacagccagacggggttagcggagcaatgcgcaggaataaggaagcgacctgcaaccgacgattcttctactcaaaacaaaagagccaacagaacagaagaaaatgtttcagacggttccccaaatgccggttctgtggagcagacgcccaagaagcctggcctcagaagacgtcaaacgtaaacagctcgaattaagaatatgtttccttgtttatcagatacatcactgcttgatgaagcaaggaagatatacatgaaaattttaaaaatacatatcgctgacttcatggaatggacatcctgtataagcactgaaaaacaacaacacaataacactaaaattttaggcactcttaaatgatctgcctctaaaagcgttggatgtagcattatgcaattaggtttttccttatttgcttcattgtactacctgtgtatatagtttttaccttttatgtagcacataaactttggggaagggagggcagggtggggctgaggaactgacgtggagcggggtatgaagagcttgctttgatttacagcaagtagataaatatttgacttgcatgaagagaagcaattttggggaagggtttgaattgttttctttaaagatgtaatgtccctttcagagacagctgatacttcatttaaaaaaatcacaaaaatttgaacactggctaaagataattgctatttatttttacaagaagtttattctcatttgggagatctggtgatctcccaagctatctaaagtttgttagatagctgcatgtggcttttttaaaaaagcaacagaaacctatcctcactgccctccccagtctctcttaaagttggaatttaccagttaattactcagcagaatggtgatcactccaggtagtttggggcaaaaatccgaggtgcttgggagttttgaatgttaagaattgaccatctgcttttattaaatttgttgacaaaattttctcattttcttttcacttcgggctgtgtaaacacagtcaaaataattctaaatccctcgatatttttaaagatctgtaagtaacttcacattaaaaaatgaaatattttttaatttaaagcttactctgtccatttatccacaggaaagtgttatttttaaaggaaggttcatgtagagaaaagcacacttgtaggataagtgaaatggatactacatctttaaacagtatttcattgcctgtgtatggaaaaaccatttgaagtgtacctgtgtacataactctgtaaaaacactgaaaaattatactaacttatttatgttaaaagattttttttaatctagacaatatacaagccaaagtggcatgttttgtgcatttgtaaatgctgtgttgggtagaataggttttcccctcttttgttaaataatatggctatgcttaaaaggttgcatactgagccaagtataattttttgtaatgtgtgaaaaagatgccaattattgttacacattaagtaatcaataaagaaaacttccatagctaaaaaaaaaaaaaaaaaaa

SEQ ID NO: 261 - DNA, 593 bp, Homo sapiens
  SLC30A1
ttctgtctcatatagaacatttataatacataacaatccataaagcctcatggtgaggtaggaacagctttggaaaataacacacagtcatgaaaacatacaaaaagttaggtaaaatgttgcagcactaaagatattttatctgcatctgtatttaatgagatgataactgcatttaactggcccacatctggcccaaaggacaggcaacagaagacacaaaacaacacaacatataagtttcataatcacagaatatactgatacacttcattgtgctgtttcaaggcagaaccataacatggcaatttgtgtctttttatatatatatataaccacatattaattgtatgttacattccctccagcatctttttgccaaagacactggaccataaaatttttggtttaaaagtttaaattgaataacatacaaaaggctcttgtgccagtgaaaatgactgctaaatattccagagcttgttagtaaaacaaaatagcattaccacatagtatcggtagagctacatcaaaatagtgctattataatcccaatttcagagacgtgaaacactgtatgacacagtttcaat

SEQ ID NO: 262 - DNA, 2457 bp, Homo sapiens
  CLC3; ClC-3
atggagtctgagcagctgttccatagaggctactatagaaacagctacaacagtataacaagtgcaagtagtgatgaggaacttttagatggagcaggtgttattatggactttcaaacatctgaagatgacaatttattagatggtgacactgcagttggaactcattatacaatgacaaatggaggcagcattaacagttctacacatttactggatcttttggatgaaccaattccaggtgttggtacatatgatgatttccatactattgattgggtgcgagaaaaatgtaaagacagagaaaggcatagacggatcaacagcaaaaagaaagaatcagcatgggaaatgacaaaaagtttgtatgatgcgtggtcaggatggctagtagtaacactaacaggattggcatcaggggcactggccggattaatagacattgctgccgattggatgactgacctaaaggagggcatttgccttagtgcgttgtggtacaaccacgaacagtgctgttggggatctaatgaaacaacatttgaagagagggataaatgtccacagtggaaaacatgggcagaattaatcataggtcaagcagagggtcctggttcttatatcatgaactacataatgtacatcttctgggccttgagttttgcctttcttgcagtttccctggtaaaggtatttgctccatatgcctgtggctctggaattccagagattaaaactattttaagtggattcatcatcagaggttacttgggaaaatggactttaatgattaaaaccatcacattagtcctggctgtggcatcaggtttgagtttaggaaaagaaggtcccctggtacatgttgcctgttgctgcggaaatatcttttcctacctctttccaaagtatagcacaaacgaagctaaaaaaagggaggtgctatcagctgcctcagctgcaggggtttctgtagcttttggtgcaccaattggaggagttctttttagcctggaagaggttagctattattttcctctcaaaactttatggagatcattttttgctgctttagtggctgcatttgttttgaggtccatcaatccatttggtaacagccgtctggtccttttttatgtggagtatcatacaccatggtacctttttgaactgtttccttttattcttctaggggtatttggagggctttggggagcctttttcattagggcaaatattgcctggtgtcgtcgacgcaagtccacgaaatttggaaagtatcccgttctggaagtcattattgttgcagccattactgctgtgatagccttccctaatccatacactaggctaaacaccagtgaactgatcaaagagctttttacagactgtggtcccctggaatcctcttctctttgtgactacagaaatgacatgaatgccagtaaaattgtcgatgacattcctgatcgtccagcaggcattggagtatattcagctatatggcagttatgcctggcactcatatttaaaatcataatgacagtattcacttttggcatcaaggttccatcaggcttgttcatccccagcatggccattggagcgatcgcaggaaggattgtggggattgcggtggagcagcttgcctactatcaccacgactggtttatctttaaggagtggtgtgaggtcggggctgattgcattacacctggcctttatgccatggttggtgctgctgcatgcttaggtggtgtgacaagaatgactgtctccctggtggttattgtttttgagcttactggaggcttggaatatattgttccccttatggctgcagtcatgaccagtaaatgggttggagatgcctttggcagggaaggcatttatgaagcacacatccgattaaatggataccctttcttggatgcaaaagaagaattcactcataccaccctggctgctgacgttatgagacctcgaaggaatgatcctcccttagctgtcctgacacaggacaatatgacagtggatgatatagaaaacatgattaatgaaaccagctacaatggatttcctgtcataatgtcaaaagaatctcagagattagtgggatttgccctcagaagagacctgacaattgcaatagaaagtgccaggaaaaaacaagaaggtatcgttggcagttctcgggtgtgttttgcacagcacaccccatctcttccagcagaaagtcctcggccattgaagcttcgaagcattcttgacatgagcccttttacagtgacagaccacaccccaatggagattgtggtggatattttccgaaagctgggactgaggcagtgccttgtaactcacaatgggcgcctccttggcattataacaaaaaaagatatcctccggcatatggcccagacggcaaaccaagaccccgcttcaataatgttcaactga

SEQ ID NO: 263 - DNA, 6817 bp, Homo sapiens
  BTEB3; FKLF2; NSLP1; RFLAT1; RFLAT-1
gcgcggcgaagctgcggccgcgacttggcgaggtggtccctaacgttgccgctcggcatccttagaaccggccgcccctgacgccgcgcggggaccccagtcgcccgcgcgccccatgcgctcactcttcggtgcccggccgggccggcgcctcgcagacgcggagccgcgcgggtgacggcacaggcggctgcgcgcccagcccagcccagcccagcccgaggagagggcgcgccgcgcccccgccccccgcccgctctcccgaggccgtgggtgcggatgcgcggctgacgactcgcagcaagagcaccgccgccggccccagcccgcagcatggcagccgccgcctatgtggaccacttcgccgccgagtgcctcgtgtccatgtcgagccgcgcggtcgtgcacgggccgcgggaggggccggagtcccggcccgagggcgcggccgtggccgccacccccacgctgccccgcgtcgaggagcgccgcgacggtaaggacagcgcctcgctcttcgtggtggcgcggatcctagcggacctcaaccagcaagcgccggcgcccgccccggcggagcgcagggagggcgccgcggcccggaaggcgaggaccccctgccgcctgccgccgcccgcccccgagcccacctcccccggcgccgaaggcgcggcggccgcgccccccagcccggcgtggagcgagccggagcccgaggcggggctggagcccgagcgggagccggggcccgcggggagcggcgagcccggcctcagacaaagggtccggcggggccgaagtcgcgccgacctcgagtccccgcagaggaagcacaagtgccactacgcgggctgcgagaaagtttacgggaaatcttcgcacctcaaggcgcacctgagaactcacacaggtgagaggcccttcgcctgcagctggcaggactgcaacaagaagttcgcgcgctccgacgagctggcgcggcactaccgcacacacacgggcgagaagaagttcagctgccccatctgcgagaagcgcttcatgcgcagcgaccacctgaccaagcacgcgcgccgccacgccaacttccacccgggaatgctgcagcggcgcggcgggggctcgcggaccggctccctcagcgactacagccgctccgacgccagcagccccaccatcagcccggccagctcgccctgagcccgccacagccatgagcagccgctcccaccccctcgtgagtccctggcctttccttttgtaataagaaagaagagagagaacttgatgcaaagtccacgaaaaaacaatttttttcacctcaggtgtcaaagtaaatttgttaaaaaaacaaaaaaaacacaaaaatttcaaaaaacaccacccaccaaattgcacaatagatacacccacaaagttgagattcagcgttgttgaaccccctttctcagggatggacacgtttcacgaggtcagtgaggacaccccttcctgccgccttactctgtacatagatttgcactctggagttttctgttaggttcgggaacacgctggggacagagcaggccagccagtctggtggagctcagcgtctggctggctggccagcctgtgggtctgttgggagcagatgtgctcactgacgtttgtgcctccagggcagattcctaagcagctggcctgacctcttcctgcccagcccccaacccagtctctggcctctgcccaacgagcctggctgggcttgcaacgcagctgattctgagacaggcccctgcagagggatgccttaaagctgtccctggctggaggagcactccaccttggggatagtggagggggccttcagccctctgcaccctgcctgcctcacaccccgccttcaggagccctctcctacggcgctagggagcactggaagcagagatgccagccctggctgagcgtagcactgcaccgtccgacctccgaggcaggggccggggtcacacctgccaggactccgcttctccgtgtcccagcagaaggcatgcaggaccctgtcactactatacctgggcctctgatggggaattctggtcttctaaaaagatgttagaaattcctggtggcacatccagttccgagtttgcccgcatgggcacttttgttggaaacagtgggcaggtcatggggcctcctcatcagagggtctgtgtgagcggctgtgcatgtggcagcgcaccatgcttcacagagaccattctgtagcaagagaccggaacattgtgacttggaccttttcaggagtggcgcggatgttacaggaaatgctgtcggagagcgcgcattctatttcctccgcagggaatgccagatagaaagttgcgggcaacacttttctcagacccaccatgtccccaactcagacttagcaaacctccagcctctccgtttcccctggactcctcctcccttttcctcctgcttctccttgtcctgcctggaggctccaggccacacccagctggtggggctgctccagtgccccatcaccggccttctcctggcaggagaggaggagcagagagctgggtcctgggctgggattcgagccctgggcgggggtcagtcaagccgtggtccagcaaactcctctgcagatggctggagtgttgacccaggcttgtggcccaggtatcaccttcccttcctcctgagagttgaggcctgtaaatacaagggcccaggacagagtgtgtgcgtgcgtgtgggtgtgtgcgcgcgtgagcacacacgcgtgtgttggggggggtggggggattggggtggactcagggtatcttgccagagatacctgttttgatgagtacctattttgatgcaaaggaacggccctgggacctcagagggccacagatgggcttcctgggcctagcgtgccttggttgtggccatcctgcttctactcagccctgccatgctatggggtgcagcacaaacccaggacccaggcctagccactgcccacagctgatggtcactgttttggctggctccagagtggacaggtacgctctgtccacagcagctgctcaggcacagtatgccgtcaggtgcccgcttcttaccactgtgtgtcagctgggattggccgacagcgtggtggtgacttctaggtagaccgatggaccctaaattgggcagtggcattgtttctgctgtggtgggaactggcagggagagggtcacctccactctggttggatgcggagctggtccctctggctgccatgctgtgttggggctctctgacctccctgcttgcattgggtctgggagagagagtggaatatttggtagggaccttgacagaagagagccctgggtgcttgtggtgcaaagatcttcatgcccagttccaaagtgaggtccctcccaaagttgttttcgtgtgaggcagagaaagccacactctgaatacattttatgtctcaggaattcacattccaggttcaggaattttattccaaagtcctttggtgcactcaccgtccaccgttccccaaggcagggagagggagtggcccgtccctgggaggctggcaaagtgctctccagggaggggtcagacgtccttgtgatctgcccagggtgtcacggaaggagattttctagctccacatctgtctgcacataggaaggaaaagataggactctaaacctagtcatcttggaataaaaagaagagctggtttgttttagagcagggcggggggtgggggagggaagcgggtgttggctgtttccaaagagagcacttaatttaatttttcctttaaatgacccagggctgttccgtctgatagatggaagggtaacattgccttaaaacagaaatatgcaggcgttggctatttttggcataagagcgtgtcttcattcccaaagtggttctcgtttaatggcagggtgcggtccttaggccccggcctggactgggaaatgggggtagggcaccaggagagaaatcctcctgggtactcctggccagaccctcctgaatcatctgcggcttaaactcatctcgcttgaagggcagggagaaacccatgaatctcaggcacggttcacaggggtcctcaagggcaggtttccatttcatcatgaagtgagggactcctgtggaagagggtggtgggccttggaacgctgcctccactgaggcgggcacacaaggcggaccctcctgaaacagcctccattttcttcaaacatgcagaatgttttcccagactgcgtctatttcagggtcttccatttttgtggtttatggccatgcttgccagttttggtggggttgaggaacccataggactcatagaaataatagtgaaaactcaaacccttattttgggacttcagttctcgtggtccataggggcagagatgtcaaagtgaaggttgcctgagtgaagggagagttcccctataaaaggcctaaaattgatctggggctcagccatcaaggggctggtgttgctcctgtcccagacaaggaagcccctctttacatcagccatattaggggaacggttgtcagctccccaaatgcctactggatcctacagccatacaggaaaacagacggacacagccctttccttaaagagccctggggtcctgtcctgcaggatgctgcataggaatgggcagagatgtcctggatgggaacatggtcctggaggtgccctacctgcatcctgctgcacccccacccacgacactcgagtgcaagatcgcctcactcctaaccctgactttattcccaggccccacaccgaggcaggtgcaggattcgccatggtgcagcctccgggtacaaacatctgaggcactggcgatcccagtccttgcagcaccctgaacacagctcagaccagtgaggggtgattcagaggtggggatgggcagagagggctggccactctgcctcaggacttgacctcaagtgttctgtctccccacccggtgtgtccagaagaccagcctctttcttgccagaagcaggtgctaagatggactgcacagggtcccggcactccctcgggacccattcaggatctcagctgggcaggggtgccacccaacaggaagatgtgatctgagcaatagtgtggccttgtttctccgcttctggttgtggctgtgtgtacagggctacctattttgacttctgacaggtgtcactgattttctttcccccatttaaaaaaggtcatttagtcaaagacacagtgctagaggtttaaagggtgtaatgtgttggtcacatcacaaccagtaagaaacgcttggtaggttatccacatcttttgctgactgtttccatatacaattctggtcaccatattttccaaagctaaaatctgaggcgtgggctgatggtttttgaaatcaggattaccccaggaagaaccaggtcctattactaattttcctgattctgaggctctgaaggcttgtctgagacacattccggagacctttgtaccagaacttggatgcatagtccaccttactactgatacacgcctgagcaccctttagggcgaggcgccgcctcctgcctgctgtcctgtccctcagcatcagaagagttgaattcagcaggagacgggagcccggtgtccatgagggaagaggggtcgcgcttggtttctactgacccccatgaagatttcagacttgcagtgcggccacctggccctgccctgcctctctctttctcatacagctttaaaactttactacttttatttaaaaatgaactggatgggagagaagtagcgtcccctaccctacaagtcacacattccggggaggggggtggggggtggaggcaggaagtcatgggggtgggggtgggagcacgggaacagctttcttaaggcctcagggtcctgttttccctggcctcttctagagggcccgtggacaggtcgcagtgcgtgcttatttggaaaccaggtgtgtgagccgaatgcctgccaggccatgcactcagcagaggagcccttgtacctggctgccctgagaggagcaagaggccacctcccatgtggctctagacaccacgtgggctcattagccccagcgtctgtgccggctccaggtgcctgcctctgggtgtgtgagtgggagactttgctccctggcctcatcctagagaggcccctggtgcctagtgctgaggcctctggggctggaaagcctcagcagaaaggaggcactactgagcaactatgcattgtcattgtcgggtttggggctttcggtggttccttggtgactgggaattgcttgtgtgcatgtgttgggtgcatgcttccgggtctcagctgccccaggcccgcacaggcaaccccttcccatccaaagccattggtggagcttctctggaatcatttgccaaaagcccaaggcagaatccaagggtccaagaccatttccatggagctcatgtttttcttttctgtaggaacttttttttaaccagcacccaccataattccgaaggccacgtttcatctttcctggatcactacagtgaagtattacagttgtacagttcccagtctggccttggcttgctcggataaaactttgtatgtattttgtatggcatagattctatattgtaatgatgtcctatgcaaaaagaaaaattaacgaaattgtaaattttattgttttaacgtgtatgcatgtttagtgacgtttacattttgaaataaaatttatgattcattattttaaaaaaaaaaaaaaaaaa

SEQ ID NO: 264 - DNA, 2594 bp, Homo sapiens
  ZNF744; FLJ10415
agtgtgctctacgtggggcggggctcaggtgcggacgccgccggttgtcctcttcgctgctccgtagtgacggggattgttgtgttgcagaaatccggcaatcgacctgaggacttgcgagccgctcagctcccgggacgtttggagctgctgctaaataatttctgctcagccatgtcgccggctccagatgcagccccggctcctgcgtcgatctccctgtttgacctcagcgcggatgctccggtctttcagggcctgagcctggtgagccacgcgcctggggaggctctggcccgggctccgcgtacttcctgttcaggctcaggggagagagaaagcccagaaagaaagctactccagggtcctatggatatttcagagaagttattttgttcaacttgtgaccagaccttccagaaccaccaagaacagagggaacattataagcttgactggcatcggtttaacctaaagcaacgtctcaaggacaagcctctcctgtctgccctggactttgaaaagcagagctccacaggagatctttccagcatctcgggatcagaagactcagactcagccagtgaggaggacttgcagacactggatcgggagagggctacatttgagaagttgagccgacccccaggcttttaccctcatcgagttcttttccagaatgcccagggccagtttctttatgcctaccgctgtgtcctaggccctcatcaggatcccccagaagaggcagaactgctgctacagaacctgcaaagtagaggtcccagagactgcgtggtgctcatggctgcagctgggcactttgctggtgctatatttcaaggaagagaagtggtgacacacaaaacttttcaccgctatacggttcgggccaagcggggcacagcccaggggcttcgggatgcccgaggtgggccatcacactctgctggagccaacctgaggcgctacaatgaagccacactatataaggatgttcgtgacctgctggcagggccaagctgggctaaggcgctggaggaggctggtacaatactgttgcgtgctccccgctctggccggtctttgttctttggaggcaagggagcacccctgcaaaggggggatccccgactttgggatatccccctcgccacccgcagacccaccttccaagagctacagcgtgtgctccataagctgaccactttgcatgtctatgaagaagaccctcgggaagcagtcagactgcactcacctcagacacactggaaaacagtaagagaggagagaaagaagcctactgaggaagaaataagaaagatctgcagggatgaaaaggaagcgctggggcagaatgaggaatctcccaaacagggttcagggtcggagggagaagatggctttcaggtagagttggagctagtggagttgactgtggggactctggatctttgtgagtctgaagtattgcccaagcggaggaggagaaaaaggaataagaaggagaaaagccgagaccaggaggctggggcacatcggactcttctccagcaaactcaagaagaggagccttccacacagtcatcccaggcagttgctgcccccttgggccctttgctggatgaggccaaagcccctggtcagccagagctctggaatgcactgcttgctgcttgccgagctggagatgttggagtgctaaagctgcagctagctcccagccctgcagaccctagagttctgtctctgctcagtgcccccttgggctccggtggctttactctcctgcatgcagcagctgcagctggaagaggctcagtggttcgtctgctgctggaagcaggtgctgaccccactgtgcaggactctcgggcccggccaccttatactgttgcggctgacaaatcaacacgtaatgagttccgaaggttcatggagaagaatccagatgcctacgattacaacaaggctcaggtgccaggaccattgacaccagaaatggaggcacggcaggctacacggaaaagggagcagaaggcagcccggcggcaacgggaggaacagcagcagaggcagcaggagcaggaggagcgtgaacgagaagagcagcggcgatttgccgccctcagtgaccgagagaagagagctctggctgcagagcgccgactcgctgcccagttgggagcccctacctctccaatccctgactctgcaatcgtcaatactcgacgctgctggagttgtggggcatccctccaaggcctgactccctttcactacctcgacttctctttctgctccacacgttgcctccaggatcatcgccgtcaggcagggaggccctcttcctgatctcttacagctctacctggggccaactcagggacctgagagggcacattcacagcagccctaggttttttcttccccgtgaaaccagagatgatttggaagatgggggtgaaggacactcgggaactagggcaaagacagggctagaggtatgtggagctggtactgtctctggaattttaatcacaataaagtttggcaaggaatgtgtacttgtacttacaaaaaaaaaaaaaaaa

SEQ ID NO: 265 - DNA, 3270 bp, Homo sapiens
  RAP1GA1; KIAA0474; rap1GAPII
ggccgcgggcaccagagtgccgagcccaggacgcccccggcccaggcccttggggtggacaagtccttcacttctcgccggagtgtgtggaggagcgatgggcagaaccagcacttccctcaggcactagacctgtcacgagtgaacttagttccctcctatactccttcactctaccctaagaacacagatctatttgagatgattgagaagatgcagggaagcaggatggatgaacaacgctgctccttcccgccgcccctcaaaacagaggaggactacattccatacccgagcgtgcacgaggtcttggggcgagaaggacccttccccctcatcctgctgccccagtttgggggctactggattgagggcaccaaccacgaaatcaccagcatccccgagacagagccactgcagtcgcccacaaccaaggtgaagctcgagtgcaaccccacagcccgcatctaccggaagcactttctcggcaaggagcatttcaattactactcactggacactgccctcggccaccttgtcttctcactcaagtacgatgtcatcggggaccaagagcacctgcggctgctgctcaggaccaagtgccggacataccatgatgtcatccccatctcctgcctcaccgagttccctaatgttgtccagatggcaaagttggtgtgtgaagacgtcaatgtggatcggttctatcctgtgctctaccccaaggcttcccggctcatcgtcacctttgacgagcatgtcatcagcaataacttcaagtttggcgtcatttatcagaagcttgggcagacctccgaggaagaactcttcagcaccaatgaggaaagtcccgctttcgtggagttccttgaatttcttggccagaaggtcaaactgcaggactttaaggggttccgaggaggcctggacgtgacccacgggcagacggggaccgaatctgtgtactgcaacttccgcaacaaggagatcatgtttcacgtgtccaccaagctgccatacacggaaggggacgcccagcagttgcagcggaagcggcacatcgggaacgacatcgtggctgtggtcttccaggatgaaaacactcctttcgtgcccgacatgatcgcgtccaacttcctgcatgcctacgtcgtggtgcaggctgagggcgggggccctgatggccccctctacaaggtctctgtcactgcaagagatgatgtgcccttctttggaccccccctcccggaccccgctgtgttcaggaaggggcctgagttccaggaatttttgctgacaaagctgatcaatgctgaatatgcctgctacaaggcagagaagtttgccaaactggaggagcggacgcgggccgccctcctggagacgctctatgaggaactacacatccacagccagtccatgatgggcttgggcggcgacgaggacaagatggagaatggcagtgggggcggcggcttctttgagtctttcaagcgggtcatccggagccgcagccagtccatggatgccatggggctgagcaacaagaagcccaacaccgtgtccaccagccacagcgggagcttcgcgcccaacaaccccgacctggccaaggcggctggaatatcactgattgtccctgggaagagccccacgaggaagaagtcgggcccgttcggctcccgccgcagcagcgccattggcatcgagaacatacaggaggtgcaggagaagagggagagccctccggctggtcagaagaccccagacagcgggcacgtctcacaggagcccaagtcggagaactcatccactcagagctccccagagatgcccacgaccaagaacagagcggagaccgcagcgcagagagcagaggcgctcaaggacttctcccgctcctcgtccagtgccagcagcttcgccagcgtggtggaggagacggagggtgtggacggagaggacacaggcctggagagcgtgtcatcctcaggaacaccccacaagcgggactccttcatctatagcacgtggctggaggacagtgtcagcaccactagtgggggcagctccccaggcccctctcgatcaccccacccagacgccggcaagttgggggaccctgcgtgtcccgagatcaagatccagctggaagcatctgagcagcacatgccccagctgggctgttagccgggccaccccctctgaaggtgaaactgagcagatgaggccacagaagcacaaggggaaggtgccgtgtcaagcccaggcagacgagacctctgccctgaagaccaacaccagcccgtgggctgccccctgcctccccaccctccccatggcccacccatctgggctgtctctgcagggcagagccgtccagacctgggatcagggaagctgctggcatcgtccccacccccagcctgggggtctgcgctggggcagggattgctcagtggaagcaggactgggggtctggcttgccccctccctgggcctccatcacccctgagcatccctctggactcagagggaacaaggtgggagagagagtttgagacagctccgtgtggagagcttagcccctggaggcagcacaaggaggatgtgatatgtgggggagtgagcactgggttgggagccgggtcctggtttccaatttgggttctgctgtgtgactctgggcaagtcactctccctctctgggcatgtctgctacaaatggacaagattatttcagaggtcactgaagactgtgattacatgcacctgccttagaaggtaggattttcttcccagggacctcctatcaccctaccctgcttcttgaggtccctggagccccaggtgggctgaggggcagggagccggctgtgcccagtatgcctcctggaccctccagttctgccacaggtctgccgatgccctgtccactgcctacacatgacagacaagtaaccccctcatgggggatggggacctacctggctcctcagccagcacccagcttaacccctgccatcccatgctgggccctccaggccaagagtctcagctggccgagagtccaggccttgcctcccccgaccgccatggagggggcagcccggcacagctgctgggagcccttgtgtgtctggtcacactttttaggcgtcacgccaaaggccagcctcctggccccaatacccattttggaagcccctgtggccgtgtggatgtcggtaacagttgtataaaataaattctatttatcgctattgt

SEQ ID NO: 266 - DNA, 1292 bp, Homo sapiens
  ARG2
  modified_base (6)..(6): a, c, t or g
  modified_base (1259)..(1259): a, c, t or g
  modified_base (1266)..(1266): a, c, t or g
  modified_base (1282)..(1283): a, c, t or g
gcgganctctgccttggagattctcagtgctgcggatcatgtccctaaggggcagcctctcgcgtctcctccagacgcgagtgcattccatcctgaagaaatccgtccactccgtggctgtgataggagccccgttctcacaagggcagaaaagaaaaggagtggagcatggtcccgctgccataagagaagctggcttgatgaaaaggctctccagtttgggctgccacctaaaagactttggagatttgagttttactccagtccccaaagatgatctctacaacaacctgatagtgaatccacgctcagtgggtcttgccaaccaggaactggctgaggtggttagcagagctgtgtcagatggctacagctgtgtcacactgggaggagaccacagcctggcaatcggtaccattagtggccatgcccgacactgcccagacctttgtgttgtctgggttgatgcccatgctgacatcaacacaccccttaccacttcatcaggaaatctccatggacagccagtttcatttctcctcagagaactacaggataaggtaccacaactcccaggattttcctggatcaaaccttgtatctcttctgcaagtattgtgtatattggtctgagagacgtggaccctcctgaacattttattttaaagaactatgatatccagtatttttccatgagagatattgatcgacttggtatccagaaggtcatggaacgaacatttgatctgctgattggcaagagacaaagaccaatccatttgagttttgatattgatgcatttgaccctacactggctccagccacaggaactcctgttgtcgggggactaacctatcgagaaggcatgtatattgctgaggaaatacacaatacagggttgctatcagcactggatcttgttgaagtcaatcctcagttggccacctcagaggaagaggcgaagactacagctaacctggcagtagatgtgattgcttcaagctttggtcagacaagagaaggagggcatattgtctatgaccaacttcctactcccagttcaccagatgaatcagaaaatcaagcacgtgtgagaatttaggagacactgtgcactgacatgtttcacaacaggcattccagaattatgaggcattgaggggatagatgaatacttaaatggttgttctgggtcaatactgccttaatggggacatttacacattctcacattgtaaagttttcccccctatttggngaccatnattactgtaaaatggnntttgggttt

SEQ ID NO: 267 - DNA, 372 bp, Homo sapiens
  MT2
agtcccagcgaacccgcgtgcaacctgtcccgactctagccgcctcttcagcacgccatggatcccaactgctcctgcgccgccggtgactcctgcacctgcgccggttcctgcaaatgcaaagagtgcaaatgcacttcgtgcaagaaaagctgctgctcctgctgccctgtgggctgtgccaagtgtgcccaaggctgcatctgcaaaggggcgtcggacaagtgcagctgctgcgcctgatgctgggacagccccgctcccagatgtaaagaacgcgacttccacaaacctggattttttatgtacaaccctgaccgtgaccgtttgctatattcctttttctatgaaataatgtgaatgataataaaa

SEQ ID NO: 268 - DNA, 3500 bp, Homo sapiens
  JAK2
atggggatggcttgccttacgatgacagaaatggagggaacatccacctcttctatatatcagaatggtgatatttctggaaatgccaattctatgaagcaaatagatccagttcttcaggtgtatctttaccattcccttgggaaatctgaggcagattatctgacctttccatctggggagtatgttgcagaagaaatctgtattgctgcttctaaagcttgtggtatcacacctgtgtatcataatatgtttgctttaatgagtgaaacagaaaggatctggtatccacccaaccatgtcttccatatagatgagtcaaccaggcataatgtactctacagaataagattttactttcctcgttggtattgcagtggcagcaacagagcctatcggcatggaatatctcgaggtgctgaagctcctcttcttgatgactttgtcatgtcttacctctttgctcagtggcggcatgattttgtgcacggatggataaaagtacctgtgactcatgaaacacaggaagaatgtcttgggatggcagtgttagatatgatgagaatagccaaagaaaacgatcaaaccccactggccatctataactctatcagctacaagacattcttaccaaaatgtattcgagcaaagatccaagactatcatattttgacaaggaagcgaataaggtacagatttcgcagatttattcagcaattcagccaatgcaaagccactgccagaaacttgaaacttaagtatcttataaatctggaaactctgcagtctgccttctacacagagaaatttgaagtaaaagaacctggaagtggtccttcaggtgaggagatttttgcaaccattataataactggaaacggtggaattcagtggtcaagagggaaacataaagaaagtgagacactgacagaacaggatttacagttatattgcgattttcctaatattattgatgtcagtattaagcaagcaaaccaagagggttcaaatgaaagccgagttgtaactatccataagcaagatggtaaaaatctggaaattgaacttagctcattaagggaagctttgtctttcgtgtcattaattgatggatattatagattaactgcagatgcacatcattacctctgtaaagaagtagcacctccagccgtgcttgaaaatatacaaagcaactgtcatggcccaatttcgatggattttgccattagtaaactgaagaaagcaggtaatcagactggactgtatgtactacgatgcagtccgaaggactttaataaatattttctgacctttgctgtcgagcgagaaaatgtcattgaatataaacactgtttgattacaaaaaatgagaatgaagagtacaacctcagtgggacaaagaagaacttcagcagtcttaaagatcttttgaattgttaccagatggaaactgttcgctcagacaatataattttccagtttactaaatgctgtcccccaaagccaaaagataaatcaaaccttctagtcttcagaacgaatggtgtttctgatgtaccaacctcaccaacattacagaggcctactcatatgaaccaaatggtgtttcacaaaatcagaaatgaagatttgatatttaatgaaagccttggccaaggcacttttacaaagatttttaaaggcgtacggagagaagtaggagactacggtcaactgcatgaaacagaagttcttttaaaagttctggataaagcacacagaaactattcagagtctttctttgaagcagcaagtatgatgagcaagctttctcacaagcatttggttttaaattatggagtatgtgtctgtggagacgagaatattctggttcaggagtttgtaaaatttggatcactagatacatatctgaaaaagaataaaaattgtataaatatattatggaaacttgaagttgctaaacagttggcatgggccatgcattttctagaagaaaacacccttattcatgggaatgtatgtgccaaaaatattctgcttatcagagaagaagacaggaagacaggaaaccctcctttcatcaaacttagtgatcctggcattagtattacagttttgccaaaggacattcttcaggagagaataccatgggtaccacctgaatgcattgaaaatcctaaaaatttaaatttggcaacagacaaatggagttttggtacaactctgtgggaaatctgcagtggaggagataaacctctaagtgctctggattctcaaagaaagctacaattttatgaagataggcatcagcttcctgcaccaaagtgggcagaattagcaaaccttataaataattgtatggattatgaaccagatttcaggccttctttcagagccatcatacgagatcttaacagtttgtttactccagattatgaactattaacagaaaatgacatgttaccaaatatgaggataggtgccctagggttttctggtgcctttgaagaccgggatcctacacagtttgaagagagacatttgaaatttctacagcaacttggcaagggtaattttgggagtgtggagatgtgccggtatgaccctctacaggacaacactggggaggtggtcgctgtaaaaaagcttcagcatagtactgaagagcacctaagagactttgaaagggaaattgaaatcctgaaatccctacagcatgacaacattgtaaagtacaagggagtgtgctacagtgctggtcggcgtaatctaaagttaattatggaatatttaccatatggaagtttacgagattatcttcaaaaacataaagaacggatagatcacataaaacttctgcagtacacatctcagatatgcaagggtatggagtatcttggtacaaaaaggtatatccacagggatctggcaacgagaaatatattggtggagaacgagaacagagttaaaattggagattttgggttaaccaaagtcttgccacaagacaaagaatactataaagtaaaagaacctggtgaaagtcccatattctggtatgctccagaatcactgacagagagcaagttttctgtggcctcagatgtttggagctttggagtggttctgtatgaacttttcacatacattgagaagagtaaaagtccaccagcggaatttatgcgtatgattggcaatgacaaacaaggacagatgatcgtgttccatttgatagaacttttgaagaataatggaagattaccaagaccagatggatgcccagatgagatctatatgatcatgacagaatgctggaacaataatgtaaatcaacgcccctcctttagggatctagctcttcgagtggatcaagtaagggataacatggctggatgaaagaaatgaccttcattctgagaccaaagtagatttacagaacaaagttttatatttcacattgctgtggactattattacatatatcattattatataaa

SEQ ID NO: 269 - DNA, 894 bp, Homo sapiens
  PCAF
  modified_base (47)..(47): a, c, t or g
  modified_base (271)..(271): a, c, t or g
  modified_base (290)..(290): a, c, t or g
  modified_base (333)..(333): a, c, t or g
  modified_base (359)..(359): a, c, t or g
  modified_base (466)..(467): a, c, t or g
  modified_base (582)..(582): a, c, t or g
  modified_base (655)..(655): a, c, t or g
  modified_base (669)..(669): a, c, t or g
gaggaagaatcatgatacacgttggattaagtatcttggactggttntaaacagtgctttgtaccggatctgctgaagcatctgtccagctggtatcctgtgaaagtttgttattttctgagtagacattcttatagagtattgtctttaaaatcagattgtctcttctatattgaaagcatttttatgttttctaatttaaaaattaatattttcttatagatattgtgcaataaagctgaagtagaatgtgtggttcttgcaaatgctntaacagctgataaaaattntacatttgtaaaattaatatattgtactggtacaaaatagttntaaattatatcttaaaaagcttacanaaaaaaaaaaaaaactcgagggggggcccggtacccaattcgccctatagtgagtcgtattacaattcactgggccgtcgtttacaacgtcgtgactgggaaaaccnnctgcgtacccaacttgaatcgcttgcagcacatgcgccttttcgcagctggcgtatagcgaagaggcccgtaccgatcgcctttccaaacagtgcgcacctgaatgcgaatgcanattgtagcgttatattttgtaaaatcccgtaaatcttgtaaatcactcattttgaccaatagccgaatcgcanaatcctataatcanagatgaccagataggttgaatgtgtccactggaccaggtcactataagacgtgactcacttaaagcggcttaagactaatcgaccctaaggaccccattaacttgcgggaagcgcaacgtgcagacgaggagaactacgtacgcctaggcctgaagttacgtaacttccttacacaaaccctcgtaagtctttaggtctaagggccttctggaattcctaactct

SEQ ID NO: 270 - DNA, 316 bp, Homo sapiens
  LOC645745
cctcttctcttctcgcttgggaacgccggtctcacctcggcttgcaatggaccccaactgctcctgcgccgctggaggctcctacgcctgcgccggctcctgcaagtgcaaaaagtgcaaatgcacctcctgcaagaagagctgctgctcctgttgccccctgggctgtgccaagtgtgcccagggctgcatccgcaaaggggcttcggaaaagtgcagctgctgtgcctgatgtcgggactgccctgctctcggatgaaaacagaatgacacgtaaagtccgggatttttttttctacaactccgactcatttgc

SEQ ID NO: 271 - DNA, 894 bp, Homo sapiens
  DD96; SPAP; MAP17; RP1-18D14.5
gcccgtcttcgtgtctcctccctccctcgccttcctccttcctagctcctctcctccagggccagactgagcccaggttgatttcaggcggacaccaatagactccacagcagctccaggagcccagacaccggcggccagaagcaaggctaggagctgctgcagccatgtcggccctcagcctcctcattctgggcctgctcacggcagtgccacctgccagctgtcagcaaggcctggggaaccttcagccctggatgcagggccttatcgcggtggccgtgttcctggtcctcgttgcaatcgcctttgcagtcaaccacttctggtgccaggaggagccggagcctgcacacatgatcctgaccgtcggaaacaaggcagatggagtcctggtgggaacagatggaaggtactcttcgatggcggccagtttcaggtccagtgagcatgagaatgcctatgagaatgtgcccgaggaggaaggcaaggtccgcagcaccccgatgtaaccttctctgtggctccaaccccaagactcccaggcacatgggatggatgtccagtgctaccacccaagccccctccttctttgtgtggaatctgcaatagtgggctgactccctccagccccatgccggccctacccgcccttgaagtatagccagccaaggttggagctcagaccgtgtctaggttggggctcggctgtggccctggggtctcctgctcagctcagaagagccttctggagaggacagtcagctgagcacctcccatcctgctcacacgtccttccccataactatggaaatggccctaatttctgtgaaataaagactttttgtatttctggggctgaggctcagcaacagcccctcaggcttccagtga

SEQ ID NO: 272 - DNA, 2214 bp, Homo sapiens
  OCTN1; MGC34546; MGC40524
cctgtttcccaggaacggtccccggcttcgcgccccaatttctaacagcctgcctgtcccccgggaacgttctaacatccttggggagcgccccagctacaagacactgtcctgagaacgctgtcatcacccgtagttgcaagtttcggagcggcagtgggaagcatgcgggactacgacgaggtgatcgccttcctgggcgagtgggggcccttccagcgcctcatcttcttcctgctcagcgccagcatcatccccaatggcttcaatggtatgtcagtcgtgttcctggcggggaccccggagcaccgctgtcgagtgccggacgccgcgaacctgagcagcgcctggcgcaacaacagtgtcccgctgcggctgcgggacggccgcgaggtgccccacagctgcagccgctaccggctcgccaccatcgccaacttctcggcgctcgggctggagccggggcgcgacgtggacctggggcagctggagcaggagagctgcctggatggctgggagttcagccaggacgtctacctgtccaccgtcgtgaccgagtggaatctggtgtgtgaggacaactggaaggtgcccctcaccacctccctgttcttcgtaggcgtgctcctcggctccttcgtgtccgggcagctgtcagacaggtttggcaggaagaacgttctcttcgcaaccatggctgtacagactggcttcagcttcctgcagattttctccatcagctgggagatgttcactgtgttatttgtcatcgtgggcatgggccagatctccaactatgtggtagccttcatactaggaacagaaattcttggcaagtcagttcgtattatattctctacattaggagtgtgcacattttttgcagttggctatatgctgctgccactgtttgcttacttcatcagagactggcggatgctgctgctggcgctgacggtgccgggagtgctgtgtgtcccgctgtggtggttcattcctgaatctccccgatggctgatatcccagagaagatttagagaggctgaagatatcatccaaaaagctgcaaaaatgaacaacatagctgtaccagcagtgatatttgattctgtggaggagctaaatcccctgaagcagcagaaagctttcattctggacctgttcaggactcggaatattgccataatgaccattatgtctttgctgctatggatgctgacctcagtgggttactttgctctgtctctggatgctcctaatttacatggagatgcctacctgaactgtttcctctctgccttgattgaaattccagcttacattacagcctggctgctattgcgaaccctgcccaggcgttatatcatagctgcagtactgttctggggaggaggtgtgcttctcttcattcaactggtacctgtggattattacttcttatccattggtctggtcatgctgggaaaatttgggatcacctctgctttctccatgctgtatgtcttcactgctgagctctacccaaccctggtcaggaacatggcggtgggggtcacatccacggcctccagagtgggcagcatcattgccccctactttgtttacctcggtgcttacaacagaatgctgccctacatcgtcatgggtagtctgactgtcctgattggaatcctcaccctttttttccctgaaagtttgggaatgactcttccagaaaccttagagcagatgcagaaagtgaaatggttcagatctgggaaaaaaacaagagactcaatggagacagaagaaaatcccaaggttctaataactgcattctgaaaaaatatctaccccatttggtgaagtgaaaaacagaaaaataagaccctgtggagaaattcgttgttcccactgaaatggactgactgtaacgattgacaccaaaatgaaccttgctatcaagaaatgctcgtcatacagtaaactctggatgattcttccagataatgtccttgctttacaaaccaaccatttctagagagtctccttactcattaattcaatgaaatggattggtaagatgtcttgaaaacatgttagtcaaggactggtaaaatacatataaagattaacactcatttccaatcatacaaatactatccaaataaaaataacatcattgtattaacgcaaatattaggtgacaacaaaaaaaaaaaaaaaaaaaaaaaa

SEQ ID NO: 273 - DNA, 527 bp, Homo sapiens
  SS; GPB; MNS; GYPA; CD235b; GPB.NY; GYPHe.NY
agttgtctttggtagtttttttgcactaacttcaggaaccagctcatgatctcaggatgtatggaaaaataatctttgtattactattgtcagaaattgtgagcatatcagcattaagtaccactgaggtggcaatgcacacttcaacctcttcttcagtcacaaagagttacatctcatcacagacaaatggagaaacgggacaacttgtccatcgtttcactgtaccagctcctgtagtgataatactcattattttgtgtgtgatggctggtattattggaacgatcctcttaatttcttacagtattcgccgactgataaaggcatgaggatgtggcctgcatgctgcctgatcttgcctagaaccggctgcacctgctgttctcttgtttatgcaaactggctgcacctgctattcctttgcttatgcccctacccctggctatcctaattccctgttctcctgcctcactattactgtattctctacttctaaataaaaataaaacaaaatacaaaccgtt

SEQ ID NO: 274 - DNA, 618 bp, Homo sapiens
  KIAA1718
aaaacagaagtaatacaattttaatttcaatattttaaaatacagaaattggaaagaatactaaatacaactttaaacaagtcacttgtcctcccctataataatcaatgtaagctacttaaagacttacaaatttaaagtaaaacagaaacaaaataaatactgtacactttccctgcctgcaggcaaaagatgggaaatactgttatgaatcagcaaagaaatgctcttcaagcttcagcaccccacctcccagccacaccccacgccattgtcacacagtgggcttccggactgaaaggacacacatgtcacacacattgactgcctatacaaacaagacgagacgctattccgcagacacccccaacaagaagaacagtcccctcggaccgtgggcataaaaaccagtaagaaaagtcagtcaggctagcaaaacgttactacaaaactagtaaataccagagccaacaactgtcccctctccaaagttcacagatttgaaacctctaaaaccaatactacccctccccatcaccccccaaaaaaacttgctgaagcactggcaaagttagacatttcacagtaaatgtgaaagttcatattatataatctctt

SEQ ID NO: 275 - DNA, 332 bp, Homo sapiens
atggaccccaactgctcgtgcgccactgggggctcctgctcctgtgccagctcctgcaagtgcaaagagtgcaaatgtacctcctgcaagaagagctgctgctcctgctgccccatgggctgtgccaagtgtgcccagggctgcgtctgcaaaggggcgtcggagaagtgcagctgctgtgcctgatgtggggacagacctgctcccagatgtaaacagagcaacctgcacaaacctggatttttttttctacaaccctgagcatttgctacatacttttttctatcaaatatgtaaacgccataaacagttttgcttgttcgggcctcctt

SEQ ID NO: 276 - DNA, 454 bp, Homo sapiens
  MT1; MT-1l
tctgtcccgctgcgtgttttcctcttgatcgggaactcctgcttctccttgcctcgaaatggaccccaactgctcctgctcgcctgttggctcctgtgcctgtgccggctcctgcaaatgcaaagagtgcaaatgcacctcctgcaagaagagctgctgctcctgctgccctgtgggctgtgccaagtgtgcccagggctgcatctgcaaagggacgtcagacaagtgcagctgctgtgcctgatgccaggacagctgtgctctcagatgtaaatagagcaacctatataaacctggatttttttttttttttttttgtacaaccctgacccgtttgctacatctttttttctatgaaatatgtgaatggcaataaattcatctagactaaaaaaaaaaaaaaaaaaaaaaaaaaaaaaaaaaaaaaaaaaaaaaaaaaaaaaaaaaaaaaaaa

SEQ ID NO: 277 - DNA, 2922 bp, Homo sapiens
  DEC1; STRA13; Stra14; SHARP-2
ggacaccgggccatgcacgcccccaactgaagctgcatctcaaagccgaagattccagcagcccaggggatttcaaagagctcagactcagaggaacatctgcggagagacccccgaagccctctccagggcagtcctcatccagacgctccgctagtgcagacaggagcgcgcagtggccccggctcgccgcgccatggagcggatccccagcgcgcaaccaccccccgcctgcctgcccaaagcaccgggactggagcacggagacctaccagggatgtaccctgcccacatgtaccaagtgtacaagtcaagacggggaataaagcggagcgaggacagcaaggagacctacaaattgccgcaccggctcatcgagaaaaagagacgtgaccggattaacgagtgcatcgcccagctgaaggatctcctacccgaacatctcaaacttacaactttgggtcacttggaaaaagcagtggttcttgaacttaccttgaagcatgtgaaagcactaacaaacctaattgatcagcagcagcagaaaatcattgccctgcagagtggtttacaagctggtgagctgtcagggagaaatgtcgaaacaggtcaagagatgttctgctcaggtttccagacatgtgcccgggaggtgcttcagtatctggccaagcacgagaacactcgggacctgaagtcttcgcagcttgtcacccacctccaccgggtggtctcggagctgctgcagggtggtacctccaggaagccatcagacccagctcccaaagtgatggacttcaaggaaaaacccagctctccggccaaaggttcggaaggtcctgggaaaaactgcgtgccagtcatccagcggactttcgctcactcgagtggggagcagagcggcagcgacacggacacagacagtggctatggaggagaatcggagaagggcgacttgcgcagtgagcagccgtgcttcaaaagtgaccacggacgcaggttcacgatgggagaaaggatcggcgcaattaagcaagagtccgaagaaccccccacaaaaaagaaccggatgcagctttcggatgatgaaggccatttcactagcagtgacctgatcagctccccgttcctgggcccacacccacaccagcctcctttctgcctgcccttctacctgatcccaccttcagcgactgcctacctgcccatgctggagaagtgctggtatcccacctcagtgccagtgctatacccaggcctcaacgcctctgccgcagccctctctagcttcatgaacccagacaagatctcggctcccttgctcatgccccagagactcccttctcccttgccagctcatccgtccgtcgactcttctgtcttgctccaagctctgaagccaatcccccctttaaacttagaaaccaaagactaaactctctaggggatcctgctgctttgctttccttcctcgctacttcctaaaaagcaacaaaaaagtttttgtgaatgctgcaagattgttgcattgtgtatactgagataatctgaggcatggagagcagattcagggtgtgtgtgtgtgtgtgtgtgtgtgtgtgtatgtgcgtgtgcgtgcacatgtgtgcctgcgtgttggtataggactttaaagctccttttggcatagggaagtcacgaaggattgcttgacatcaggagacttgggggggattgtagcagacgtctgggcttttccccacccagagaatagcccccttcgatacacatcagctggattttcaaaagcttcaaagtcttggtctgtgagtcactcttcagtttgggagctgggtctgtggctttgatcagaaggtactttcaaaagagggctttccagggctcagctcccaaccagctgttaggaccccacccttttgcctttattgtcgacgtgactcaccagacgtcggggagagagagcagtcagaccgagctttctgctaacatggggaggtagcaggcactggcatagcacggtagtggtttggggaggtttccgcaggtctgctccccacccctgcctcggaagaataaagagaatgtagttccctactcaggctttcgtagtgattagcttactaaggaactgaaaatgggccccttgtacaagctgagctgccccggagggagggaggagttccctgggcttctggcacctgtttctaggcctaaccattagtacttactgtgcagggaaccaaaccaaggtctgagaaatgcggacaccccgagcgagcaccccaaagtgcacaaagctgagtaaaaagctgcccccttcaaacagaactagactcagttttcaattccatcctaaaactccttttaaccaagcttagcttctcaaaggcctaaccaagccttggcaccgccagatcctttctgtaggctaattcctcttgcccaacggcatatggagtgtccttattgctaaaaaggattccgtctccttcaaagaagttttatttttggtccagagtacttgttttcccgatgtgtccagccagctccgcagcagcttttcaagatgcactatgcctgattgctgatcgtgttttaactttttcttttcctgtttttattttggtattaagtcgttgcctttatttgtaaagctgttataaatatatattatataaatatattaaaaaggaaaatgtttcagatgtttatttgtataattacttgattcacacagtgagaaaaaatgaatgtattcctgtttttgaagagaagaataatttttttttctctagggagaggtacagtgtttatattttggagccttcctgaaggtgtaaaattgtaaatatttttatctatgagtaaatgttaagtagttgttttaaaatacttaataaaataattcttttcctgtggaag

SEQ ID NO: 278 - DNA, 892 bp, Homo sapiens
  MT1E
gctgctttccaactgcctgactgcttgttcgtctcactggtgtgagctccagcatcccctttgctcgaaatggaccccaactgctcttgcgcactggtggctcctgcacgtgcgccggtcctgcaagtgcaaagagtgcaaatgcacctcctgcaagaagagctgctgttcctgctgccccgtggctgtgccaagtgtgcccaggctgcgtctgcaaaggggcatcggagaagtgcagctgctgtgcctgatgtgggaacagctcttctcccagatgtaaatagaacaactgcacaaactggatttttttaaaaatacaacactgagccattttggcttgcatttcttttttatactaaaatatgtgactgacaaataaaacaacaacttttgaccaaaaaaaaaaagacgaaaacaaacaaaacacaaatcttttgggggcgcgcctcggggcccggaaaaagttttacaaaccccttcgttggggcgcgcgcgggccccacgatgggctaatagtacacacgtggcacaaagcgtgtcccagacgagaccccgcggccaggcacacacgtgcgcggggttttccccccaataaaaaacccgcgggcgggcaccgagcgtttgggaccaattccaggtggacgttcgggcacaataccgggctctacacagggccccaaggaggctaaaaaaaatacgcggagcgtagtaagcaagaacacaccacgagacacacatgaacaccagcgacgcagacagcacgaccataggagagcagtgcgaaacgaaccgatatgacgcagcaaagtacacgaccagaccaacgagactaggcacaccaccaagcagactcagcacgcgatccgcagaccgacagacaaacaccacacgc

SEQ ID NO: 279 - DNA, 5963 bp, Homo sapiens
  EVI9; CTIP1; BCL11A-L; BCL11A-S; FLJ10173; FLJ34997; KIAA1809; BCL11A-XL
ttttttttttttttttgcttaaaaaaaagccatgacggctctcccacaattcatcttccctgcgccatctttgtattatttctaatttattttggatgtcaaaaggcactgatgaagatattttctctggagtctccttctttctaacccggctctcccgatgtgaaccgagccgtcgtccgcccgccgccgccgccgccgccgccgccgcccgccccgcagcccaccatgtctcgccgcaagcaaggcaaaccccagcacttaagcaaacgggaattctcgcccgagcctcttgaagccattcttacagatgatgaaccagaccacggcccgttgggagctccagaaggggatcatgacctcctcacctgtgggcagtgccagatgaacttcccattgggggacattcttatttttatcgagcacaaacggaaacaatgcaatggcagcctctgcttagaaaaagctgtggataagccaccttccccttcaccaatcgagatgaaaaaagcatccaatcccgtggaggttggcatccaggtcacgccagaggatgacgattgtttatcaacgtcatctagaggaatttgccccaaacaggaacacatagcagataaacttctgcactggaggggcctctcctcccctcgttctgcacatggagctctaatccccacgcctgggatgagtgcagaatatgccccgcagggtatttgtaaagatgagcccagcagctacacatgtacaacttgcaaacagccattcaccagtgcatggtttctcttgcaacacgcacagaacactcatggattaagaatctacttagaaagcgaacacggaagtcccctgaccccgcgggttggtatcccttcaggactaggtgcagaatgtccttcccagccacctctccatgggattcatattgcagacaataacccctttaacctgctaagaataccaggatcagtatcgagagaggcttccggcctggcagaagggcgctttccacccactccccccctgtttagtccaccaccgagacatcacttggacccccaccgcatagagcgcctgggggcggaagagatggccctggccacccatcacccgagtgcctttgacagggtgctgcggttgaatccaatggctatggagcctcccgccatggatttctctaggagacttagagagctggcagggaacacgtctagcccaccgctgtccccaggccggcccagccctatgcaaaggttactgcaaccattccagccaggtagcaagccgcccttcctggcgacgccccccctccctcctctgcaatccgcccctcctccctcccagcccccggtcaagtccaagtcatgcgagttctgcggcaagacgttcaaatttcagagcaacctggtggtgcaccggcgcagccacacgggcgagaagccctacaagtgcaacctgtgcgaccacgcgtgcacccaggccagcaagctgaagcgccacatgaagacgcacatgcacaaatcgtcccccatgacggtcaagtccgacgacggtctctccaccgccagctccccggaacccggcaccagcgacttggtgggcagcgccagcagcgcgctcaagtccgtggtggccaagttcaagagcgagaacgaccccaacctgatcccggagaacggggacgaggaggaagaggaggacgacgaggaagaggaagaagaggaggaagaggaggaggaggagctgacggagagcgagagggtggactacggcttcgggctgagcctggaggcggcgcgccaccacgagaacagctcgcggggcgcggtcgtgggcgtgggcgacgagagccgcgccctgcccgacgtcatgcagggcatggtgctcagctccatgcagcacttcagcgaggccttccaccaggtcctgggcgagaagcataagcgcggccacctggccgaggccgagggccacagggacacttgcgacgaagactcggtggccggcgagtcggaccgcatagacgatggcactgttaatggccgcggctgctccccgggcgagtcggcctcggggggcctgtccaaaaagctgctgctgggcagccccagctcgctgagccccttctctaagcgcatcaagctcgagaaggagttcgacctgcccccggccgcgatgcccaacacggagaacgtgtactcgcagtggctcgccggctacgcggcctccaggcagctcaaagatcccttccttagcttcggagactccagacaatcgccttttgcctcctcgtcggagcactcctcggagaacgggagcttgcgcttctccacaccgcccggggagctggacggagggatctcggggcgcagcggcacgggaagtggagggagcacgccccatattagtggtccgggcccgggcaggcccagctcaaaagagggcagacgcagcgacacttgtgagtactgtgggaaagtcttcaagaactgtagcaatctcactgtccacaggagaagccacacgggcgaaaggccttataaatgcgagctgtgcaactatgcctgtgcccagagtagcaagctcaccaggcacatgaaaacgcatggccaggtggggaaggacgtttacaaatgtgaaatttgtaagatgccttttagcgtgtacagtaccctggagaaacacatgaaaaaatggcacagtgatcgagtgttgaataatgatataaaaactgaatagaggtatattaatacccctccctcactcccacctgacaccccctttttcaccactccccttccccatcgccctccagccccactccctgtaggatttttttctagtcccatgtgatttaaacaaacaaacaaacaaacagaagtaacgaagctaagaatatgagagtgcttgtcaccagcacacctgttttttttctttttctttttcttttttctttttccttttttttttttttcctttatgttctcaccgtttgaatgcatgatctgtatggggcaatactattgcattttacgcaaactttgagcctttctcttgtgcaataatttacatgttgtgtatgtttttttttaaacttagacagcatgtatggtatgttatggctattttaaattgtccctaattcgttgctgagcaaacatgttgctgtttccagttccgttctgagagaaaaagagagagagagagaaaaagaccatgctgcatacattctgtaatacatatcatgtacagttttattttataacgtgaggaggaaaaacagtctttggattaaccctctatagacagaatagatagcactgaaaaaaaatctctatgagctaaatgtctgtctctaaagggttaaatgtatcaattggaaaggaagaaaaaaggccttgaattgacaaattaacagaaaaacagaacaagtttattctatcatttggttttaaaatatgagtgccttggatctattaaaaccacatcgatggttctttctacttgttataaacttgtagcttaattcagcattgggtgaggtaataaaccttaggaactagcatataattctatattgtatttctcacaacaatggctacctaaaaagatgacccattatgtcctagttaatcatcatttttcctttagtttaattttataaacaaaactgattataccagtataaaagctactttgctcctggtgagagcttaaaagaaatgggctgttttgcccaaagttttattttttttaaacaatgattaaattgaatgtgtaatgtgcaaaagccctggaacgcaattaaatacactagtaaggagttcattttatgaagatatttgctttaataatgtctttttaaaaatactggcaccaaaagaaatagatccagatctacttggttgtcaagtggacaatcaaatgataaactttaagaccttgtataccatattgaaaggaagaggctgacaataaggtttgacagaggggaacagaagaaaataatatgatttattagcacaacgtggtactatttgccatttaaaactagaacaggtatataagctaatattgatacaatgatgattaactatgaattcttaagacttgcatttaaatgtgacattcttaaaaaaagaagagaaagaattttaagagtagcagtatatatgtctgtgctccctaaaagttgtacttcatttcttttccatacactgtgtgctatttgtgttaacatggaagaggattcattgtttttatttttatttttttaattttttcttttttattaagctagcatctgccccagttggtgttcaaatagcacttgactctgcctgtgatatctgtatcttttctctaatcagagatacagaggttgagtataaaataaacctgctcagataggacaattaagtgcactgtacaattttcccagtttacaggtctatacttaagggaaaagttgcaagaatgctgaaaaaaaattgaacacaatctcattgaggagcattttttaaaaactaaaaaaaaaaaaactttgccagccatttacttgactattgagcttacttacttggacgcaacattgcaagcgctgtgaatggaaacagaatacacttaacatagaaatgaatgattgctttcgcttctacagtgcaaggatttttttgtacaaaacttttttaaatataaatgttaagaaaaattttttttaaaaaacacttcattatgtttaggggggaactgcattttagggttccattgtcttggtggtgttacaagacttgttatccatttaaaaatggtagtggaaattctatgccttggatacacaccgctcttcaggttgtaaaaaaaaaaaacatacattggggaaaggtttaagattatatagtacttaaatataggaaaatgcacactcatgttgattcctatgctaaaatacatttatggtcttttttctgtatttctagaatggtatttgaattaaatgttcatctagtgttaggcactatagtatttatattgaagcttgtatttttaactgttgcttgttctcttaaaaggtatcaatgtaccttttttggtagtggaaaaaaaaaagacaggctgccacagtatatttttttaatttggcaggataatatagtgcaaattatttgtatgcttcaaaaaaaaaaaaaagagagaaacaaaaaagtgtgacattacagatgagaagccatataatggcggtttgggggagcctgctagaatgtcacatggatggctgtcataggggttgtacatatccttttttgttcctttttcctgctgccatactgtatgcagtactgcaagctaataacgttggtttgttatgtagtgtgctttttgtccctttccttctatcaccctacattccagcatcttaccttcatatgcagtaaaagaaagaaagaaaaaaaaaggaaaaaaaaaaaaaaaccaatgttttgcagtttttttcattgccaaaaactaaatggtgctttatatttagattggaaagaatttcatatgcaaagcatattaaagagaaagcccgctttagtcaatacttttttgtaaatggcaatgcagaatattttgttattggccttttctattcctgtaatgaaagctgtttgtcgtaacttgaaattttatcttttactatgggagtcactatttattattgcttatgtgccctgttcaaaacagaggcacttaatttgatcttttatttttctttgtttttatttttttttttatttagatgaccaaaggtcattacaacctggctttttattgtatttgtttctggtctttgttaagttctattggaaaaaccactgtctgtgtttttttggcagttgtctgcattaacctgttcatacacccattttgtccctttattgaaaaaataaaaaaaattaaaagtacaaaaaaaaaaaaaaaaa

SEQ ID NO: 280 - DNA, 397 bp, Homo sapiens
  MT1; MGC70702
accacgccctccacgtgttccactgcctcttctcttctcgcttgggaactccagtctcacctcggcttgcaatggaccccaactgctcctgcgaggctggtggctcctgcgcctgcgccggctcctgcaagtgcaaaaagtgcaaatgcacctcctgcaagaagagctgctgctcctgttgccccctgggctgtgccaagtgtgcccagggctgcatctgcaaaggggcgtcagagaagtgcagctgctgtgcctgatgtcgggacagccctgctgtcagatgaaaacagaatgacacgtaaaatccaggattttttttttctacaactccgactcatttgctacattcctttttttctgtgaaatatgtgaataataattaaacacttagacttga

SEQ ID NO: 281 - DNA, 711 bp, Homo sapiens
  ATXN1
  modified_base (386)..(386): a, c, t or g
  modified_base (409)..(409): a, c, t or g
  modified_base (417)..(417): a, c, t or g
  modified_base (471)..(472): a, c, t or g
ctcacccaaaatgggtgtcctgaaggaggactgaggttcagcagttaactgaccttttatacaagttagcacatgaaggatagatatgcactgaaacatgtggtctggtctgacttgagagaaaaggaatgttgcacaagggttgtgaatgtgaaagggggaatggaggaatggaaataaaattgggatgagccctaatggaggaagtcgggcaaattgaaagtataaatgaatgggccatgagtgttcagagggagaaaagaaaggtttaatatactccttcagttgagttttcttgtcttgaacataaaaagtgaatacaaataaattcagtaatactaaaacatacagagatactgaacttgctggcacatttacttctggtnagcataaagcagagagaacccangttagaanggatggaagagaaaggagcagttttattgcttatagaaagccgtctgaagggtnngtgggtaagctcagtctattactgagacaatagtgagatgggctattatgttcccctggtaatatctgggtaaaatattgatccatcaaatgggatgctccgcacattagcaaaattaggagttcatctttttcattgaatacaagtggagacctccatttcctttctgtttcaggcctttgacccctggagcccattacaactcaataatttgatttatgattataaaggtccatttt

SEQ ID NO: 282 - DNA, 4576 bp, Homo sapiens
  PTPRF
gatccccgcccctgctgcccgccacgtccctcacgtaccactcggcagaggcgcggggaaacctggcgtactggctgtggcttctctagcgggactcggcatgaggctggcgcggctgcttcgcggagccgccttggccggcccgggcccggggctgcgcgccgccggcttcagccgcagcttcagctcggactcgggctccagcccggcgtccgagcgcggcgttccgggccaggtggacttctacgcgcgcttctcgccgtccccgctctccatgaagcagttcctggacttcggatcagtgaatgcttgtgaaaagacctcatttatgtttctgcggcaagagttgcctgtcagactggcaaatataatgaaagaaataagtctccttccagataatcttctcaggacaccatccgttcaattggtacaaagctggtatatccagagtcttcaggagcttcttgattttaaggacaaaagtgctgaggatgctaaagctatttatgactttacagatactgtgatacggatcagaaaccgacacaatgatgtcattcccacaatggcccagggtgtgattgaatacaaggagagctttggggtggatcctgtcaccagccagaatgttcagtactttttggatcgattctacatgagtcgcatttcaattagaatgttactcaatcagcactctttattgtttggtggaaaaggcaaaggaagtccatctcatcgaaaacacattggaagcataaatccaaactgcaatgtacttgaagttattaaagatggctatgaaaatgctaggcgtctgtgtgatttgtattatattaactctcccgaactagaacttgaagaactaaatgcaaaatcaccaggacagccaatacaagtggtttatgtaccatcccatctctatcacatggtgtttgaacttttcaagaatgcaatgagagccactatggaacaccatgccaacagaggtgtttacccccctattcaagttcatgtcacgctgggtaatgaggatttgactgtgaagatgagtgaccgaggaggtggcgttcctttgaggaaaattgacagacttttcaactacatgtattcaactgcaccaagacctcgtgttgagacctcccgcgcagtgcctctggctggttttggttatggattgcccatatcacgtctttacgcacaatacttccaaggagacctgaagctgtattccctagagggttacgggacagatgcagttatctacattaaggctctgtcaacagactcaatagaaagactcccagtgtataacaaagctgcctggaagcattacaacaccaaccacgaggctgatgactggtgcgtccccagcagagaacccaaagacatgacgacgttccgcagtgcctagacacacttgggacatcggaaaatccaaatgtggcttttgtattaaatttggaaggtatggtgttcagaactatattataccaagtactttatttatcgttttcacaaaactatttgagtagaataaatggaaactgaattccatttgtgcccgttaaacctcctaaaggatgaaattgcacctattttacacttatattttcacagttaattgaacatatttttaaacaactgtagttttgggcaacttttcactttgtggtagacttcagaagtgtggaaatcttcgggtttctataggaaactagttttttttttttaagaaatactttcatttatgtttgctagaaacattttctaaatgatagtgattagctggttagccatcttcctgttatttggaggagttctgccatcttttattcggtagtgacagctgtaatatggtcttcatgtttatcagtgacttgactacaagtaaagcagaaaacagttggcctgtaatcacagaaccagccacccttcggcgtctacatgcattgtcttagctctgaggttaatttaccatttttaaattttattgtaaagaagtgtaatgactagctctctgtggatctatgccaaaatcatgggccatcttttctaagtgtacttctgattaatgcaaggggaaatttttatactgaaaacaaacaaacaaactagcagctactaaaatagagaagaaattgagggcaaagtaatatgtctccaaaactgaactgattgcttgttgagattacctagaaagcttttggaaaaaaatagagcttttctgcatcctactccagatacactgaatcggaatccctagggctagagcctagaaatctcactttttaaaatgcttccaaggtaagtctgatgcctaccctaggttgggaaccactctttcaaagtaaacagtgatgacacagcatttgctaaagtaacatctgtaggttttggtttccacctatttaaagtcagatttatagactcgaggagacagaaactgaatcccacacctggtgcaattagaagcataattagaagcagaagaacaaaatgccacgtaaccaaagcatcagagccatcattgcacgtgtctttttttcttttttcttttttttttttcaagacagggtctcgctcttttgcccaggatggagtacagtggcatggtcaaggctcactgcagcttcaatcttctgggctcaagtaatccttccacctcagcctcccatatagctggaactacagttgtgcactaccacacccagctaattttttgatttcttgtggagatgaggtctcagtatgttcccaggctagtgttgaactcctgagctcaagaaatcctcctgcctgagtctctgaaagtgctgggattacaggcgtgagccaccacacatggcctattgcacaagtcttgacaaacaacatatattttctaaaactatccagatttcattatcagggaaaagtttgcttaggtttattacagcagtccttggcatttgtatggtaatttgtactttacaaatactttgatatattataactctattggtctttgaaacaaagcgatacagtgtaggtggtatcattctctttctcactcagtgtggcccagagttgctcagaattggagcagagcctgagacgtatctgcagatcctgtcatcagctggcaagtccaggagactgtgtcatttagagactgtgttgttagttatccctcaacatcttctaaggtggcaggaaataatattggaaataacattttaaagtaaaaattttaaagtttaaagaagagttttgccacttaaacaggggagctttgtctggaaaatacactgagttgaaacacttcatccttggaaggattatataagatgaacagttgtgataaatgtgtagattagagggatgtgaatgggcagttagtccagtgccctcatttaagaggccaagatcctgattcagaggaggcatcctttgcccagagctgcttagctaatctgaccaaatgttgggaaaaatgtctcacctaacccactattccttaattatggattttgtgaaaaacaatagaacatgttaatgagtaatttatattagttcgatgtattacaattttttagctttaaattacagttttcttataatgttgaaatgttttagaatcctttgaatctaagtatttgtttcctaaatgaaacatttgtacaacatttgatgtttttacttatgaaatattctcctcccccaagaaaatttaaactttttctctctatttaaaagctaagaaatgttttaaaggaaaaatgaaattatcttcctttagcttatttttaaggtaaaacagctttttactctgttattgtggtaatggacagaatattacatacaaaaatattctgggagagctttttcctagttggttttaaatcattgtgccacctgaaaggtttttagattttataggagctaatttgtccaccagcattaatgtaacacagtgtagttatgaaaatatattgaaggacaggaagtggacacgaagtgatttttgtaacctgagcagttaatgaatgtgccaacattttctaggaagggacagcaagaatattctgctctgtagttaaaatactggctggcttttgatgtcttcatgcttaattgtgatcactttcttgcactgtgatgtttttacgtgaatatgttgaagtagaagtctaccatattattttataaaatgttttctgtatggcaataaactgaaaacatggatcaacccttcttttgaaaataaactgagtcaatttagccttttaaaaatatagtcatctcttttaaatagaatcctcttccaccatcaaggctcaacattttgtaagcatccaaaaaattggtaattagggggcttgcactaaatttcactatcttcagtagagaggaactgtttggaacttagatttccaatgtgtatattctaatggagaaagcaagaggtagagtttgtatgtttgacttaccttagatttttattttccatacatactgcaaatgattgacttgttgcataaatgaagatcttctgttgtgtgcttttcaaacactgtaaataaatttgaaatttgaa

SEQ ID NO: 283 - DNA, 483 bp, Homo sapiens
  GYPA
  modified_base (433)..(433): a, c, t or g
aacggtttgtattttgttttatttttatttagaagtagagaatacagtaatagtgaggcaggagaacagggaattaggatagccaggggtaggggcataagcaaaggaatagcaggtgcagccagtttgcataaacaagagaacagcaggtgcagccggttctaggcaagatcaggcagcatgcaggccacatcctcatgcctttatcagtcggcgaatactgtaagaaattaagaggatcgttccaataataccagccatcacacacaaaataatgagtattatcactacaggagctggtacagtgaaacgatggacaagttgtcccgtttctccatttgtctgtgatgagatgtaactctttgtgactgaagaagaagttgaagtgtgcattgccacctcagtggtacttaatgctgatatgctcacaatntctgacaatagtaatacaaagaattatttttccatacatccttgagatca

SEQ ID NO: 284 - DNA, 1564 bp, Homo sapiens
  DERP7; FLJ10134
gaagcacatctggacagctgtgcggcctccttgcgggccgacgtcagccgagcacgtcccccacgtcctctccttctcgccacttattatttattcgttttcccaaagaagcgactagggacccaagtttaaaaattcctccccccactcaatgcgagacgtggccagatcccatccaacacacggtttaattttcatggggctctgggatcaaaagaacagaaacagcaacaacaaaagcccagccgctgtctgattttaagctggcaaagtgggaaaaataaagtgttgagtaaacagaccaagttggatcatggggaatttcagaggtcatgccctccctggaaccttcttttttattattggtctttggtggtgtacaaagagtattctgaagtatatctgcaaaaagcaaaagcgaacctgctatcttggttccaaaacattattctatcgattggaaattttggagggaattacaatagttggcatggctttaactggcatggctggggagcagtttattcctggagggccccatctgatgttatatgactataaacaaggtcactggaatcaactcctgggctggcatcatttcaccatgtatttcttctttgggctgttgggtgtggcagatatcttatgtttcaccatcagttcacttcctgtgtccttaaccaagttaatgttgtcaaatgccttatttgtggaggcctttatcttctacaaccacactcatggccgggaaatgctggacatctttgtgcaccagctgctggttttggtcgtctttctgacaggcctcgttgccttcctagagttccttgttcggaacaatgtacttctggagctattgcggtcaagtctcattctgcttcaggggagctggttctttcagattggatttgtcctgtatccccccagtggaggtcctgcatgggatctgatggatcatgaaaatattttgtttctcaccatatgcttttgttggcattatgcagtaaccattgtcatcgttggaatgaattatgctttcattacctggttggttaaatctagacttaagaggctctgctcctcagaagttggacttctgaaaaatgctgaacgagaacaagaatcagaagaagaaatgtgactttgatgagcttccagtttttctagataaaccttttcttttttacattgttcttggttttgtttctcgatcttttgtttggagaacagctggctaaggatgactctaagtgtactgtttgcatttccaatttggttaaagtatttgaatttaaatattttctttttagctttgaaaatattttgggtgatactttcattttgcacatcatgcacatcatggtattcaggggctagagtgatttttttccagattatctaaagttggatgcccacactatgaaagaaatatttgttttatttgccttatagatatgctcaaggttactgggcttgctactatttgtaactccttgaccatggaattatacttgtttatcttgttgctgcaatgagaaataaatgaatgtatgtattttggtgc

SEQ ID NO: 285 - DNA, 2723 bp, Homo sapiens
  MMA; PAQR11
gggcggggcgcaggagccccggggcggaggagccggggaggcgggaggcgggaggcgggaggtgttggggccgttgaagcggcctccctcccgcccccagccgcccggtctggccccagccctgtcccgacccccggcctggcccactccgaccctacccggccgaagggttccgctggacacgcaggcggcctccggagcagcccaagcccatgagggccgcgcgcccggccgccggtgctgacgagacggagctcctggcccccgaggaggagcagaggatcaatgcggttcaagaatcgattccagcggttcatgaaccatcgagctccagccaatggccgctacaagccaacttgctatgaacatgctgctaactgttacacacacgcattcctcattgttccggccatcgtgggcagtgccctcctccatcggctgtctgatgactgctgggaaaagataacagcatggatttatggaatgggactctgtgccctcttcatcgtttctacagtatttcacattgtatcatggaaaaagagccacttaaggacagtggagcattgttttcacatgtgtgatagaatggttatctatttcttcattgctgcttcttatgctccatggttaaatcttcgtgaacttggacccctggcatctcatatgcgttggtttatctggctcatggcagctggaggaaccatttatgtatttctctaccatgaaaaatataaggtggttgaactctttttctatctcacaatgggattctctccagccttggtggtgacatcaatgaacaacaccgatggacttcaggaacttgcctgtgggggcttaatttattgcttgggagttgtgttcttcaagagtgatggcatcattccatttgcccacgccatctggcacctgtttgtggccacggcagctgcagtgcattactacgccatttggaaatacctttaccgaagtcctacggactttatgcggcatttatgaccaatctgtactaattctccaaaccagtattatttcaattatggcacttgggagtggggtgagagctaaacattgcacagggaaagaaaaaaaataactgcactgactttatatcttttgaatataattactgtgaaagtataaaggctgtgttctggaattttctgcctcacagcaaataaataaggtagtgaattaattattcattccattccactatcatgaaggactctgaatagacttggccaactgatgtttacaaaccagacttttatattttaattttacagattttactacatgatttttctaaattactatgtcaggttgtaaaagtcagtgcaataacaaaccttcctttttaagaagaaaattgtttctattactttcccattcactaggtaaagaatcatggacagaacttacactactttttaccatgtttcatcttggcataacatggttcttttttaaatagaaactttagttttttgtaaatttttaaaaaaatatttcattgatatgcatctctgcaggtcctcattcatgttgtaaatttttgcagcaagcagtcaacattccacaaacgaacaaacattatacctcttctgatagttttattaagcatggagaaattgccaatttttaaaaactgcagttttccaaacttttctgccaacctcttactctgaattcagtgctgctttgggacatatacttgacctagcttggtttaccagtgatggaaaagtattttgatatcattaactttttcaaaagatccaactttttctctatgcctttgccacattctcttcagggtctctttccacagtggataaatgttttttctgtattatgacagtattgttgtgatggccatctgctggaaactcctgaagagcattatgtattacagtgagcagttgtattgcctgtttggtgcccaatggttaagtcattgtcacttagctttatattgtcagtttgatatttattttaaattgtggaactagatgcataaattcacatttctgcctttcctttgcatcttctcatatattgtgtttttttttttttttcctagaaaaaatatttaaagcattgtttgacaggtagaaactcatgtatctgtagtccatgagttatatcctggctcagtggagtgatatttatgtattatttttacttttctctcagtgtcttatattaagattaacatgttgttaatagttgctttgttgattaatctctcttgttggtgttttaataaatgaaataggcttgcctttagatcgggtgctgatattgcctgtttcctagtaatgggctgatcaaatgatcagtggaattcttggtttgatgataaccttattaattgaaattttttactgatgtggctttaaaagaggtttattttgtatatgtttagaactctctgattttgatgaattatatgggaatgagaaacagaagaagtggtatttgctggcgagttaaataggcaaggtacccagtgataacaccaaccaaaccactcctatctgcatgattctgaacatctggatgcctgttgttttactgtgtatattttatttttaatatattaactttgtggattcatttaaggtctactcaaaagtaacactgtcaaaaccactaatatgtatgtaaaaattgtgctgtatactacaataaagttgttacttggatttgttcca

SEQ ID NO: 286 - DNA, 1386 bp, Homo sapiens
  DO; DOK1; CD297
ctgggaaagggaaggctgaactgctgagtctgacacttaacaggacttcggcattcccctgaatacagactagatcagagattttatttttttaattgaaaagtaacttgggttctctttagaaacccttatttggtgtgcgcatctggctatttcacagagatttcagttttgcaaagaagtcggagttgatttcttccctcagacaagctattggttgttggtgggcaacagaagttgctcagcatagacaggggaaaaaacggttacggatgagactgaaagaaaacctcaaaggagaactctgagaattcatctcaggatgaagctgcaagggcaaaggagaagtacttgtgacacaagcaaatgggtccattgatcaacagatgcaagaagattcttctcccaactactgtacctcctgcaacgatgagaatctggctccttggaggcctgctgccattcctgctgctcctctctggcctgcagagacccacagagggttctgaggttgcaattaaaatcgacttcgacttcgcaccaggttcttttgatgatcagtaccaaggctgtagcaaacaggttatggagaaactaactcaaggggattatttcacaaaagacatagaagcccagaagaattattttaggatgtggcaaaaagcccacttagcctggcttaaccaaggaaaagttctaccccagaacatgactaccacacacgctgtggctattttgttttatacattgaacagcaatgttcattctgactttactagagccatggcctctgttgccaggactccacagcagtatgaacgttcattccacttcaaatatttacactactacctcacctcagcaatccagctgctgaggaaagacagcatcatggagaatggcactctgtgctatgaggtgcattataggacgaaggatgtccactttaatgcctacacaggggccaccattcgatttggccaattcctctccacatccctcctgaaagaagaggcacaggagtttgggaaccagacactatttaccatattcacctgcctgggtgcacctgtacagtacttctccctcaagaaggaagtcttgatccctccctatgagctgtttaaagttataaatatgagctaccacccaagaggagactggttgcagttgaggtcaactgggaacctgagcacatataactgtcagctgctaaaagcttccagcaagaaatgcatccctgatcctatagctattgcatctctctcctttttgaccagtgtcatcatcttttccaaaagcagagtataaagaaatcttgtggctccttttatttaaaaaaaatatttaaataaaatcttttttattggcaaaaaaaaaaaaaaa

SEQ ID NO: 287 - DNA, 458 bp, Homo sapiens
  beta globin pseudogene
  modified_base (399)..(399): a, c, t or g
  modified_base (442)..(442): a, c, t or g
ttttcttagagagcatatttctttattctatttttatcatgcaggaactgaatcagcaggcaggatactgctcttctccccaacctcccccatctaaaggagatgagattttgggacataggtacaaacatagtggaccataggtacaaacatagtggacagggaactcagtggtcttgtgggctacagcattaaccacagcatttgttagttactgccaagaagcctgtatctgtagggtaaaatcctcgctgaagtgggttgccaaaacaatcaatatcacgttgcctaagagcaggaagttctcagggtccacgtgcagcttgttacagtgcaggtcactcagtgtagcaaaggtgcctttgaggtcatccgtgagcataacagcttttccgaagnggattcagcaccttcttgccatgtgccttgactttggggttgnccattattggcacagt

SEQ ID NO: 288 - DNA, 499 bp, Homo sapiens
  GPE; MNS; MiIX
agttgtctttggtagtttttttgcactaacttcaggagccagctcgtgatctcaggatgtatggaaaaataatctttgtattactattgtcagaaattgtgagcatatcagcatcaagtaccactggtgtggcaatgcacacttcaacctcttcttcagtcacaaagagttacatctcatcacagacaaatgggataacactcattaattggtgggcgatggctcgtgttatttttgaggtgatgcttgttgttgttggaatgatcatcttaatttcttactgtattcgatgactgataaaggcatgaggatgtggcctgcatgctgcctgatcttgcctagaaccagctgcacctgctgttctcttgcttatgcaaactggctgcacctgctattcctttgcttatgccccaacccttggctatcctaactccctgttctcctgcctattactgtattctctacttctaaataaaaataaaacaaaatacaaattatt

SEQ ID NO: 289 - DNA, 3151 bp, Homo sapiens
  PBGS; ALADH; MGC5057
gctcttacgcggtctgtgggagaccggagcgggagacagcggtgacaggagcagcggccgggagcccttagggaggcagacagagcctgcagccaatgccccaggagccctcggttccaaccaactgatgcccctgtgcccactggcccacgccatgcagccccagtccgttctgcacagcggctacttccacccactacttcgggcctggcagacagccaccaccaccctcaatgcctccaacctcatctaccccatctttgtcacggatgttcctgatgacatacagcctatcaccagcctcccaggagtggccaggtatggtgtgaagcggctggaagagatgctgaggcccttggtggaagagggcctacgctgtgtcttgatctttggcgtccccagcagagttcccaaggacgagcggggttccgcagctgactccgaggagtccccagctattgaggcaatccatctgttgaggaagaccttccccaacctcctggtggcctgtgatgtctgcctgtgtccctacacctcccatggtcactgcgggctcctgagtgaaaacggagcattccgggctgaggagagccgccagcggctggctgaggtggcattggcgtatgccaaggcaggatgtcaggtggtagccccgtcggacatgatggatggacgcgtggaagccatcaaagaggccctgatggcacatggacttggcaacagggtatcggtgatgagctacagtgccaaatttgcttcctgtttctatggccctttccgggatgcagctaagtcaagcccagcttttggggaccgccgctgctaccagctgccccctggagcacgaggcctggctctccgagctgtggaccgggatgtacgggaaggagctgacatgctcatggtgaagccgggaatgccctacctggacatcgtgcgggaggtaaaggacaagcaccctgacctccctctcgccgtgtaccacgtctctggagagtttgccatgctgtggcatggagcccaggccggggcatttgatctcaaggctgccgtactggaggccatgactgccttccgcagagcaggtgctgacatcatcatcacctactacacaccgcagctgctgcagtggctgaaggaggaatgatggagacagtgccaggcccaagaactagaactttaaaacgttcccggggcctcagacaagtgaaaaccaaagtaaatgctgcttttagaactgtgccctcatgccctcttcctgctcacatgctagcggggcccagcagccctgggtggttttgccagcatgctaactcttgtaactcgcagctgcatcctatgagctctcccaagcttccccgcccctcccctgggtcagccgtgaggcccacctttgccaccctcagctctttcctctggtgtggcttcagcttgaaagcaacctggagtcgggggcacagcctttggggcctggctgggagagggtcttggagcattaggggaagaagagagcagtgggatcttggggcctgagaagccttggaacgcttctggcagcagagctgggtgtgggaatgaggcctagatcgatatccctgggttagagttgaaatttgccgcaattccactggaaggcatttcccacgaggccagaggttgccaggctgcctgaggtctcctattctactctgaaccataaacccagagaagaattactcattaaccagcataaatactgcctgaggatcaaaactcagaggcaaagagggagttcctgactgctagaggtgccaccaccacaaacactttttattcaggagatactttttgagaatctctgctctgttcctaggttcagtgctgggtcctgggaatacagcaggacagacctcagcttatctcttcatagaaattatacaaagagaattggggagacagctaagaagaaaacaaagaaataaagcagttacaaattgtgataagtgctttgaaggaaagaaggggtctgagacaacaacagggaaggggcctctcttgaaacagtagttgggaaggaggcagacatgcaccagtgatgtggtgacaggtgctctgaaggaggtcaccaggacctgacctctttgaaggatcagaaaatacttccctgaaggactgacatttgagcctagacctgaagggtgagccatcaagctaagacaattggggaagagcattccagggagagggaggagttgtgcaaaggccctggggctccttctagctggaggaatgcaaggctagcttgtctggagcactgagaggatggcctgaactgagtggagagagacagaccaggaccaaaccatgcagaggtcaagggccacattcaccttttcagagtgactcaatcaaatttgtagtttgtaaaagtattttaacagctctgcggcaaagtgcaaatgaaaagtcttgatggcatggactggagcggggacagtggggatggagaaaggggaatggattgtggatgtgtttagaaggtagattcgatgtgaaggatgaatctggcttgaccttctgggtggctgatgggccatttactgagatggggcagcctggaagaggaacagaagcagggtcggggtggagggagaatactaaacttagcttgagacattttgcaataaggaagctatatctagagtgcttatgtgactcacctaaggccactcaacaagtttgtggcagaactggattagaactgcacagaaaacagccaagctgggatttgaacccatgtagtccaactccaaggcctctgcccctaaccactgtgccataccacctcccaataatcaacagcaaaattataggtctaacaatgttttatagacacccctccatttatgtgatgggtttgcatcctgataaacccatcataagttgaaaatatgatcataagttgaaaatatgatcataagtcaaaaatgtatttaatatacctaacctaccaaacatcatagcttagcctagcctgccttaaacatgctcagaacacttacattagcctacagtgggcaaaactatccaacacaaaatctatattgtaataaagttgtaaagaattttgaataaaaattcaatatttgaagtacaaaaaaaaaaaaaaaaa

SEQ ID NO: 290 - DNA, 357 bp, Homo sapiens
  MN; GPA; MNS; GPSAT; CD235a; GPErik; HGpMiV; HGpMiX; GpMiIII; HGpMiXI; HGpMiIII; HGpSta(C)
atgtatggaaaaataatctttgtattactattgtcagcaattgtgagcatatcagcattaagtaccactgaggtggcaatgcacacttcaacctcttcttcagtcacaaagagttacatctcatcacagacaaatggagaaagggtacaacttgcccatcatttctctgaaccagagataacactcattatttttggggtgatggctggtgttattggaacgatcctcttaatttcttacggtattcgccgactgataaagaaaagcccatctgatgtaaaacctctcccctcacctgacacagacgtgcctttaagttctgttgaaatagaaaatccagagacaagtgatcaatga

SEQ ID NO: 291 - DNA, 464 bp, Homo sapiens
  SLC7A11
ttttgagatgaagtctcgcgctcttgtcccctaggctggagtgcaatgatgcgatcttggctaactgcagcttctgccccttgggttcaagtgattctcctgcctcagcctcccgagtagctgggattacaggcgcctgccaccacgcccggctaatttttatatttttagttgagacagggtttcaccatgttggccaggctgatctcgaactcctgacctcaggtgattcgcccgcctcagcctcccaaagtgctgggattacaggcatgagccaccgtgccggacctatttaaaaatctttttgaagtacagtactaataaactaaggactacctagagatcacacttttagatattatctattttaacatagattaaaaatactgtttatatgaaaattaagcttaaatacacgtataggtaataattattttgcccatatacaagtaatgtaaacagag

SEQ ID NO: 292 - DNA, 1783 bp, Homo sapiens
  MGC26273
gcaatgggaaacattggtcgacaactggcaatgtacgaatgtaaagttatcgcagaaaaatctcatcaggaatgaagaaggcaaaaaatatcttttgtacagaaaagcaagatgaaaaggatgtgaaatggtagatataccaacaaaacttcagactgtaaaattgccaggatgcagttttccccttgattggcgtgtgtgtatatatggataaatatatatatacacacacacatattactgcaatctgtgattgcttcatctgtaaatcagttgtaaacctttacatatttgacttaaataactgtaagatatatatgtactacattaaaaagtgttgattaatagatgaaatttttaaattaattttttaaaacatgccatacattgtatcacaatgttaatgtgccaagatattgttcctgtcatgcagagtataagaatgctttgaacaatttgtagacttagtgaaataaaataagaggaaagccaaaaacaaacaaacaaaaagcatatggggagctggtattttctctttagcttactgttgtgcctttttatttttctaatcacagcagtatgagttatgagtgccctaatttgtggttagtttctaatttaatgttgtttcatagagtttggagtgttttgatacagggtgaaaatgaacttctggtttcaaacctgcgttactggagacagcccaaagagtaattttctgttttgacaggttttactggaagtatatgtgatgagcagaagaggttatcagcattaaattgttttggttctaaatttggaacagtatatataattaaaagtaaggaacattagaggatttaattagaataaatacatgttttggaaatacagtgacctcttgcagtgtcacaaaagtgcaaagtgatattagctgtcatctgcaatacagaatctcattgcttttgcacatggagcatataggaaactccaaacagatcacaatgaggtttctaaatctgttgggttctgtcttctattgggttctgtgaagcaaaccactgtagctttagctgggttcagtcatatgactcgttggtggaatgcctaggtttttcatcttacatgcagtcttgggggtggatgaatacataatttcttatgtattcgtgtatccattagtgaatagttcaagtctgtttaagagtgtattgagatggcattctctgcatgttaaagatcttaatggcaaccagcacctcttaagtatggtttaaacatattcttagctaattttttccattagtttttgaaattggtggcagttgtctgatccacaagggcaagatcttctgagtactctggggtgtgagtatgtgtgcacacgtgtgtgttggagtgagtgagagaatgtgtctgtgcatgtggccatgctttcctagaatgtcaagtagatatttttacactttgagttttaaagcaattactatcagactgagatcttgtatgccaaactttaatctgcttttatgttttcaggctgaaggtgtgaaaatcctaagaggatttcatattgaatatgtgtacacaatcttaactatcgtggtggaaaacatactactataatttattattatatcttccagataatgttattcatttagaacaaataaggtatattttttagaatcaactttgtaagcactataaaatctttaataagttataaggtctatgatgtgtttactttaaaaattgctgttaaaagcaacacgtattaaatatgtaattatcaaaaaaaaaa

SEQ ID NO: 293 - DNA, 3272 bp, Homo sapiens
  MXI; MAD2; MXD2; MGC43220
cacgcgcgggctgcccgcggcacggcgggcgcggctggcgcggctggggcggcaggggcggcggagagcgcgccgagccgcggccgagctggcccgcccgcccgtcgcacatgttccggaacggcgcccggccgtagccgcctgcggcgcctcctgtcggcccgagaagggagtgcggagaggcgccggtcgccacccgcggtgcccatggagcgggtgaagatgatcaacgtgcagcgtctgctggaggctgccgagtttttggagcgccgggagcgagagtgtgaacatggctacgcctcttcattcccgtccatgccgagcccccgactgcagcattcaaagcccccacggaggttgagccgggcacagaaacacagcagcgggagcagcaacaccagcactgccaacagatctacacacaatgagctggaaaagaatcgacgagctcatctgcgcctttgtttagaacgcttaaaagttctgattccactaggaccagactgcacccggcacacaacacttggtttgctcaacaaagccaaagcacacatcaagaaacttgaagaagctgaaagaaaaagccagcaccagctcgagaatttggaacgagaacagagatttttaaagtggcgactggaacagctgcagggtcctcaggagatggaacgaatacgaatggacagcattggatcaactatttcttcagatcgttctgattcagagcgagaggagattgaagtggatgttgaaagcacagagttctcccatggagaagtggacaatataagtaccaccagcatcagtgacattgatgaccacagcagcctgccgagtattgggagtgacgagggttactccagtgccagtgtcaaactttcattcacttcatagaacccagcatgacataacagtgcagggcaaaatattcactgggccaattcaatacaaacaatctcttaaattgggttcatgatgcagtctcctctttaaaacaaaacaaaacaaaacaaaactatacttgaacaaaagggtcagaggacctgtatttaagcaaatacttagcaaaaagtggggcagagcctcccaaggagaacaaatattcagaatattcatattggaaaaatcacaatttttaatggcagcagaaaacttgtgtgaaattttcttgatttgagttgattgagaagaggacattggagatgccatcctctttctcttttctagtttgctcatactacattgagtagacacatttaaggatggggttatgaacccttcctgagctttatggtcctaaaagcaaaataaaaactattcgaatgaaaagacaagaaaatcaggtattaatcttggatagctaataatgagctattaaaactcagcctgggacagtttatcatgaagcctgtggatgatcaatcctttattattattttttttttttgaaaaaagctcatttcatgctctgcaaaaggagagactcccatgaagccttttgaaagggatcatcatgcagctcaactttctgttggattccatgctaagcaagctaaccttatcctgcattgttagcactaggcacccagctgccacctctccatcctgctgcccttaggccacatgggagcagtccatgcatgacagcctctatcctacaaggcctatgagtatggattgggggggccaaaaggaaaaagctccatgtgcctctttgtctgcgtgggtcagaagagttgtgcacgcagattagcaggccaaggtctgagccacagcagcatttttatttcagattttgataactgtttatatgtgttgaaaaccaaaatgacatctttttaaagcttatccataaaaaaaaatagatgtcttttatagtggaaaaacacatggggaaaaaaatcatctattttgatgcagcatttgataatgataaaacacctcacacctcactctttatagtgcacaaaatgaatgaggtctgggctaggtagaaaaagggtcaatgctatttttgtttttagaatcattaccttttaccagcttttaaccatctgatatctatagtagacacactatcatagttaacatagtaagttcagcacttgtctcattttaatgtaaagatttgcttccattttcctacaggcagtctctctcttcctcacagtcccactgtgcaggtgctattgttactcttacgaatattttcagtaatgttattttcttctaagtgaaatttctagcctgcactttgatgtcatgtgttccctttgtctttcaaactccaaggttcccttgtggccctctcccttaccctgggaaggcctcttggagaccttacccctggctgtttggactttgtatactttaaataatttaactacccttaattacttaaaaaaaaaaaaaagctttatgattttcataacttattgctgattttaatggattgttaatttcagtcctgtagttttattttatgtttagatagggctgggcaaggaaaaagaaaataaagacaaccatatttagcagtgcagttgagttgtgtgttaatgttagactatccctttgtgagtgacactttaacagcattcactgcttctatatatagtgtaccatcttggtcatacattacgcctcaacatatacttgtgctcttcctttgcctccagaagaagtttttccttgattgtgctatgtttcagtggaagaaattctttgaagtagatgtgagtgaaaaactgcatgcctttagaagcccagtatcagaacttgctacgtttcaggtgctagggacttaatgaaaaacaggacaaaacaattcctttttgtggcccaggtaaattatttctggtttcacttataattactaatggctgagtcaagatgttgtctctgtgtttgcttactcttgatcaagtgtgagacagtttgaagactgtgctaccatacaaagtgaatgaagccagtgactaagcttctgtttgttttgttattctcatggccttcgcttgcattatttgggccttcattcagatgaacttgaggtgccattttgttgcatatgtacaggattatgggctggaaagcatttgttataaacctatagtgcacattttaactgccccctaaattacccttccctgggtttgttttccttggggtggtgtagattgtatgagtaagaagtattaattttttaaaagacaaatcaactttgaagacacaaaagttaattggaagaaataaaaactgtgaacgaagaa

SEQ ID NO: 294 - DNA, 1543 bp, Homo sapiens
  PD1; NACP; PARK1; PARK4; MGC110988
ggagtggccattcgacgacagtgtggtgtaaaggaattcattagccatggatgtattcatgaaaggactttcaaaggccaaggagggagttgtggctgctgctgagaaaaccaaacagggtgtggcagaagcagcaggaaagacaaaagagggtgttctctatgtaggctccaaaaccaaggagggagtggtgcatggtgtggcaacagtggctgagaagaccaaagagcaagtgacaaatgttggaggagcagtggtgacgggtgtgacagcagtagcccagaagacagtggagggagcagggagcattgcagcagccactggctttgtcaaaaaggaccagttgggcaagaatgaagaaggagccccacaggaaggaattctggaagatatgcctgtggatcctgacaatgaggcttatgaaatgccttctgaggaagggtatcaagactacgaacctgaagcctaagaaatatctttgctcccagtttcttgagatctgctgacagatgttccatcctgtacaagtgctcagttccaatgtgcccagtcatgacatttctcaaagtttttacagtgtatctcgaagtcttccatcagcagtgattgaagtatctgtacctgcccccactcagcatttcggtgcttccctttcactgaagtgaatacatggtagcagggtctttgtgtgctgtggattttgtggcttcaatctacgatgttaaaacaaattaaaaacacctaagtgactaccacttatttctaaatcctcactatttttttgttgctgttgttcagaagttgttagtgatttgctatcatatattataagatttttaggtgtcttttaatgatactgtctaagaataatgacgtattgtgaaatttgttaatatatataatacttaaaaatatgtgagcatgaaactatgcacctataaatactaaatatgaaattttaccattttgcgatgtgttttattcacttgtgtttgtatataaatggtgagaattaaaataaaacgttatctcattgcaaaaatattttatttttatcccatctcactttaataataaaaatcatgcttataagcaacatgaattaagaactgacacaaaggacaaaaatataaagttattaatagccatttgaagaaggaggaattttagaagaggtagagaaaatggaacattaaccctacactcggaattccctgaagcaacactgccagaagtgtgttttggtatgcactggttccttaagtggctgtgattaattattgaaagtggggtgttgaagaccccaactactattgtagagtggtctatttctcccttcaatcctgtcaatgtttgctttatgtattttggggaactgttgtttgatgtgtatgtgtttataattgttatacatttttaattgagccttttattaacatatattgttatttttgtctcgaaataattttttagttaaaatctattttgtctgatattggtgtgaatgctgtacctttctgacaataaataatattcgaccatg

SEQ ID NO: 295 - DNA, 396 bp, Homo sapiens
  MT1; MT1K; MGC12386
actccgccttccacgtgcacccactgcctcttcccttctcgcttgggaactctagtctcgcctcgggttgcaatggaccccaactgctcctgtgccgctggtgtctcctgcacctgcgccagctcctgcaagtgcaaagagtgcaaatgcacctcctgcaagaagagctgctgctcctgctgccctgtgggctgtgccaagtgtgcccaaggctgcatctgcaaaggggcatcggagaagtgcagctgctgcgcctgatgtcgggacagccctgctcccaagtacaaatagagtgacccgtaaaatctaggattttttgttttttgctacaatcttgacccctttgctacattcccttttttctgtgaaatatgtgaataataattaaacacttag

SEQ ID NO: 296 - DNA, 1317 bp, Homo sapiens
  FY; Dfy; GPD; CCBP1; CD234
tttttcctgagtgtagtcccaaccagccaaatccaacctcaaaacaggaagacccaaggccagtgacccccataggcctgaggcttgtgcaggcagtgggcgtggggtaaggcttcctgatgccccctgtccctgcccagaacctgatggccctcattagtccttggctcttatcttggaagcacaggcgctgacagccgtcccagcccttctgtctgcgggcctgaaccaaacggtgccatggggaactgtctgcacagggcggagctctccccctcaactgagaactcaagtcagctggacttcgaagatgtatggaattcttcctatggtgtgaatgattccttcccagatggagactatggtgccaacctggaagcagctgccccctgccactcctgtaacctgctggatgactctgcactgcccttcttcatcctcaccagtgtcctgggtatcctagctagcagcactgtcctcttcatgcttttcagacctctcttccgctggcagctctgccctggctggcctgtcctggcacagctggctgtgggcagtgccctcttcagcattgtggtgcccgtcttggccccagggctaggtagcactcgcagctctgccctgtgtagcctgggctactgtgtctggtatggctcagcctttgcccaggctttgctgctagggtgccatgcctccctgggccacagactgggtgcaggccaggtcccaggcctcaccctggggctcactgtgggaatttggggagtggctgccctactgacactgcctgtcaccctggccagtggtgcttctggtggactctgcaccctgatatacagcacggagctgaaggctttgcaggccacacacactgtagcctgtcttgccatctttgtcttgttgccattgggtttgtttggagccaaggggctgaagaaggcattgggtatggggccaggcccctggatgaatatcctgtgggcctggtttattttctggtggcctcatggggtggttctaggactggatttcctggtgaggtccaagctgttgctgttgtcaacatgtctggcccagcaggctctggacctgctgctgaacctggcagaagccctggcaattttgcactgtgtggctacgcccctgctcctcgccctattctgccaccaggccacccgcaccctcttgccctctctgcccctccctgaaggatggtcttctcatctggacacccttggaagcaaatcctagttctcttcccacctgtcaacctgaattaaagtctacactgcctttgtgaaaaaaaaaaaaaaaaaa

SEQ ID NO: 297 - DNA, 691 bp, Homo sapiens
  FGFR1
  modified_base (652)..(652): a, c, t or g
tttttttttttttttttctttaactttatcatttataaagccatacaatgcattgcaaagaaacaaagcagctgtacaggagtggggacgcgtcagtgtacaatacattcatgtccaggataaggagcagacaccaggatttatacacggtggcagcggctataggcacgatgatacaaaatataaagtatatttccatctatataaatacacagctggggtggggaaggatgctgggtgatcttgtttcccccgcagagggcctgggaggcagggagggtggtgggaagggatttcttacatttgttctcaatgatgggtctgaagggaggagagaaatggggaaacacagcctgcacacactgatgtgctctcacacacacgcacaaacaaaacacagacacaggagagtttcaaacagcttaacactgattggaaaacaagcttgggacatccctctacagtaactccactgctggcaagagcccaggcgtgggatatgaacagaggtcctccaacattttggacatttgaggacagaggggccaagagggacagatctgcccgaggcccccaccctgcccctctgggtgaaccacttctcacctgggctatcgctgagactccaccaattggttggcctacaggcctnacctccgactcccctcactgctgggcgaccttgaatttg

SEQ ID NO: 298 - DNA, 2469 bp, Homo sapiens
  NIPK; SINK; TRB3; SKIP3; C20orf97
gacagagcaagactctgtctcaaaaaaaaaaaaaaaaagagcaaattttttttccaaggtgatagggagagtccgtggctgatgtctgcactgaccagacgcccctagggggccagcgagggcgggtcccaggtgcagcggatgcagaggagagaggcccgggcgcggcgcgggggatggtgcgatcccgggcccgagggcatcagacggcggctgattagctccggtttgcatcacccggaccgggggattagctccggtttgcatcacccggaccgggggattagctccggtttgcatcacccggaccgggggccgggcgcgcacgagactcgcagcggaagtggaggcggctccgcgcgcgtccgctgctaggacccgggcagggctggagctgggctgggatcccgagctcggcagcagcgcagcgggccggcccacctgctggtgccctggaggctctgagccccggcggcgcccgggcccacgcggaacgacggggcgagatgcgagccacccctctggctgctcctgcgggttccctgtccaggaagaagcggttggagttggatgacaacttagataccgagcgtcccgtccagaaacgagctcgaagtgggccccagcccagactgcccccctgcctgttgcccctgagcccacctactgctccagatcgtgcaactgctgtggccactgcctcccgtcttgggccctatgtcctcctggagcccgaggagggcgggcgggcctaccaggccctgcactgccctacaggcactgagtatacctgcaaggtgtaccccgtccaggaagccctggccgtgctggagccctatgcgcggctgcccccgcacaagcatgtggctcggcccactgaggtcctggctggtacccagctcctctacgcctttttcactcggacccatggggacatgcacagcctggtgcgaagccgccaccgtatccctgagcctgaggctgccgtgctcttccgccagatggccaccgccctggcgcactgtcaccagcacggtctggtcctgcgtgatctcaagctgtgtcgctttgtcttcgctgaccgtgagaggaagaagctggtgctggagaacctggaggactcctgcgtgctgactgggccagatgattccctgtgggacaagcacgcgtgcccagcctacgtgggacctgagatactcagctcacgggcctcatactcgggcaaggcagccgatgtctggagcctgggcgtggcgctcttcaccatgctggccggccactaccccttccaggactcggagcctgtcctgctcttcggcaagatccgccgcggggcctacgccttgcctgcaggcctctcggcccctgcccgctgtctggttcgctgcctccttcgtcgggagccagctgaacggctcacagccacaggcatcctcctgcacccctggctgcgacaggacccgatgcccttagccccaacccgatcccatctctgggaggctgcccaggtggtccctgatggactggggctggacgaagccagggaagaggagggagacagagaagtggttctgtatggctaggaccaccctactacacgctcagctgccaacagtggattgagtttgggggtagctccaagccttctcctgcctctgaactgagccaaaccttcagtgccttccagaagggagaaaggcagaagcctgtgtggagtgtgctgtgtacacatctgctttgttccacacacatgcagttcctgcttgggtgcttatcaggtgccaagccctgttctcggtgctgggagtacagcagtgagcaaaggagacaatattccctgctcacagagatgacaaactggcatccttgagctgacaacacttttccatgaccataggtcactgtctacactgggtacactttgtaccagtgtcggcctccactgatgctggtgctcaggcacctctgtccaaggacaatccctttcacaaacaaaccagctgcctttgtatcttgtaccttttcagagaaagggaggtatccctgtgccaaaggctccaggcctctcccctgcaactcaggacccaagcccagctcactctgggaactgtgttcccagcatctctgtcctcttgattaagagattctccttccaggcctaagcctgggatttgggccagagataagaatccaaactatgaggctagttcttgtctaactcaagactgttctggaatgagggtccaggcctgtcaaccatggggcttctgacctgagcaccaaggttgagggacaggattaggcagggtctgtcctgtggccacctggaaagtcccaggtgggactcttctggggacacttggggtccacaatcccaggtccatactctaggttttggataccatgagtatgtatgtttacctgtgcctaataaaggagaattatgaaataaaaaaaaaaaaaaaaaaa

SEQ ID NO: 299 - DNA, 569 bp, Homo sapiens
  SLC25A37
  modified_base (464)..(464): a, c, t or g
gcggccgccacgacccccctggacgtctgtaagacccttctgaacactcaggagaacgtggccctctcgctggccaacatcagcggccggctgtcgggtatggccaatgccttccggacggtgtaccagctcaacggcctggccggctacttcaaaggcatccaggcgcgtgtcatctaccagatgccctccaccgccatttcttggtctgtctatgagttcttcaagtacttcctcaccaagcgccagctggaaaatcgagctccatactaaaggaagggatcatagaatcttttcttaaagtcattctctgcctgcatccagccccttgccctctcctcacacgtagatcattttttttttttgcagggtgctgcctatgggccctctgctccccaatgccttagagagaggaggggacggcacggccgctcaccggaaggctgtgtgcggggacatccgangtggtggtggacaggaaggacttgggaaggggagcgagaaattgctttttctcttcctccctgggcagaatgtagcttttctgcttcactgtggcagcctcctcc

SEQ ID NO: 300 - DNA, 6817 bp, Homo sapiens
  ST4
cagctccgaggggagtcggaccggagcaaacagccacccccggcttcgtcccccacgaagaggaagggcaggagccgtgccctcgaggccgtgcccgccccgcccgccagcggcccccgggctcccgccaaggagtccccacccaagagggtgcccgatcccagcccagtcaccaagggcactgcggccgagagcggggaggaggcggcgcgggccatcccccgcgagctcccggtcaagagcagctcgctgctgccggagatcaagcccgagcacaagaggggcccgctccccaaccacttcaacggccgggcagagggaggtcgaagcagagagctgggcagagcggccggagcgcctggagcttctgacgccgacggcttgaagcccaggaaccatttcggcgtgggcaggtcgacagtgaccactaaagtgaccctccctgccaagcccaaacatgtggaactaaatcttaaaacccctaagaatcttgacagtttgggaaatgagcacaatccatttagccagccagttcacaaaggcaacactgccaccaaaatctccttatttgaaaacaaacggacaaacagtagcccaagacacactgacattcgaggcccaaggaatactcctgcctctagtaaaacgtttgttgggagggcaaagctgaatttagccaaaaaagccaaagaaatggagcaacctgaaaagaaagtaatgccaaacagtccccagaatggtgtgctggttaaggaaactgctatagaaaccaaagttaccgtctcggaagaagagattctgccagcaaccagaggaatgaatggagactcttctgagaatcaagctcttggtcctcagcctaaccaagatgataaagcagatgtacaaacagatgctggctgcctttcagaaccagtggcttctgctctgattcctgtcaaggatcataagctcttagagaaggaggactcagaggctgcagacagcaaaagccttgtacttgaaaatgtaaccgatacagcacaagacatccccaccactgtggataccaaagatttacctccaacggccatgccaaagccacagcatacattttctgactcacagtcccctgctgagtcatctcctgggccttctctttcactgtctgcacccgctcctggggatgttcccaaagacacatgtgttcaatcacccataagcagtttcccatgcactgatctaaaagtgtcagaaaaccataaaggatgtgttttgcctgtgtctcgtcagaacaatgagaaaatgccacttttagaacttggaggagaaacaacccctcctttgtccacagagcgtagtccagaagctgtgggaagtgagtgtccatccagagtcctcgtccaggtcaggtccttcgtgctccccgtggagagcacccaggatgtgagctcccaggtcatcccagagagctctgaagttagagaagtgcagttgccaacttgtcacagtaatgaacctgaagtggtttccgttgcaagttgtgctcccccacaagaggaagtactgggcaatgaacactctcattgcacagcagagctcgcggcaaaatctggcccacaagtcataccgccagcatcagagaaaactctgcctattcaggctcaaagtcagggcagcagaacacccctgatggctgaatccagtcccaccaactctcccagcagcggaaatcacttagccactcctcaaaggccagatcagactgttacaaatggccaggatagccctgccagccttttgaacatttctgctggtagtgatgatagtgtatttgattcttcttctgatatggaaaaattcactgaaattataaaacagatggatagcgcagtttgtatgcccatgaaaagaaagaaggccaggatgccaaactctcctgctcctcactttgccatgcctcctattcacgaagaccatttagaaaaggtgtttgatcccaaagtgtttacctttggtttggggaagaagaaggaaagtcagccagaaatgtcaccggctttacatttgatgcagaaccttgacacaaaatccaaactgagacccaaacgtgcatctgctgaacagagcgtcctcttcaagtccctgcacaccaacactaatgggaacagtgagcctctggtgatgccggaaatcaatgacaaagagaacagggacgtcacaaatggtggcattaagagatcgagactagaaaaaagtgcacttttctcaagcttgttatcttctttaccacaagacaaaatcttttctccttctgtgacatcagtcaacactatgaccacggctttcagtacttctcagaacggttccctatctcagtcttcagtgtcacagcccacgactgagggtgccccgccctgtggtttgaacaaagaacagtcaaatcttctgcccgacaactccttaaaggtcttcaatttcaactcgtcaagtacatcacactccagtttgaaaagtccaagccacatggaaaaatacccgcaaaaagagaaaaccaaagaagatctggattcacgaagcaacctacacttgccagaaactaaattttctgaattgtcaaaactgaagaatgatgatatggaaaaggctaatcatattgaaagtgttattaaatcaaacttgccaaactgtgcaaacagtgacaccgacttcatgggtcttttcaaatcaagccggtatgacccaagcatttctttttctggaatgtcattatcagacacaatgacacttagaggaagtgtccaaaataaactcaatccccgacctggaaaggtagtgatatatagtgaacccgacgtctctgagaagtgcattgaagttttcagtgacattcaggattgcagttcttggagcctctctccagtgatactcataaaagttgttagaggatgttggattttgtatgagcaaccaaattttgaagggcactccatccccttagaagaaggagaattggaactctctggtctctggggtatagaagacattttggaaaggcacgaagaagcagagtctgataagccagtggtgattggttccatcagacatgtggttcaggattacagagttagtcacattgacttatttactgaaccagaagggttaggaatcctaagttcctactttgatgatactgaagaaatgcagggatttggtgtaatgcagaagacttgttccatgaaagtacattggggcacgtggctgatttatgaagaacctggatttcagggtgttcctttcatcctggaacctggtgaataccctgacttgtccttctgggatacagaagcagcgtacattggatccatgcggcctctgaaaatgggtggccgtaaagttgaattccctacagatccaaaggtagttgtttatgaaaagcctttctttgaaggaaaatgtgtggaactagaaacaggaatgtgtagttttgtcatggagggaggtgaaacagaagaggcgactggagacgatcatttgccgtttacgtcagtggggtctatgaaagttctaagaggcatttgggttgcatatgagaagcctggatttaccggtcatcagtatttgctagaagaaggagaatacagggactggaaagcctggggaggttacaatggagagcttcagtctttacgacctatattaggtgatttttcaaatgctcacatgataatgtacagtgaaaaaaactttggatccaaaggttccagtattgatgtattgggaattgttgctaatttaaaggagactggatatggagtgaagacacagtctattaatgtactgagtggagtatgggtagcctatgaaaatcctgacttcacaggagaacagtatatactggataaaggattttataccagttttgaggactggggaggcaaaaattataagatctcttctgttcaacctatatgtttggattctttcactggcccaaggagacgaaatcagattcacttgttttcagaaccacagtttcaaggtcacagtcaaagttttgaagaaacaacaagtcaaattgatgattcattttctaccaagtcttgcagagtttcaggaggcagctgggttgtatatgatggagaaaatttcactggtaatcaatacgtgttggaagaaggccattatccttgtctgtctgcaatgggatgcccgcctggagcaactttcaagtctcttcgttttatagatgttgaattttctgaaccaacaattattctctttgaaagagaagacttcaaaggaaaaaagattgaacttaatgcagaaactgtcaatctccgatccctgggattcaacacacaaatacgctctgttcaggttattggtggcatatgggttacttatgaatatggcagttacagagggcgacagttcctattgtcacctgcagaagtacctaattggtatgaattcagtggctgtcgccaaataggttctctacgaccttttgttcagaagcgaatttatttcagacttcgaaacaaagcaacagggttattcatgtcaaccaatggaaacttagaggatctgaagcttctgaggatacaggtcatggaggatgtcggggccgatgatcagatttggatctatcaagaaggatgtatcaaatgcaggatagcagaagactgctgcctgacgattgtgggcagcctggtaacatctggctccaagctaggcctggccctggaccagaatgctgacagccagttctggagcttgaagtccgatggcaggatttacagcaagttgaagccaaatttagttttagacattaaagggggcacacagtatgatcaaaatcacattatcctcaacactgtcagcaaagagaagtttacacaagtgtgggaagccatggtcctatatacctgaacaaagaaggaagaagaatcttctggaggtccttccagccaccttatttcttaaaaaggacaatgctgatggaagaccagactggaaagtggatcgactcctccttcattgattctaaattcaaccttaaatcatgctgccatgactcagagaacttactcatcgtttcaaaagactatcatagctttaaaccaataatttgtcctcctttcatttcttgcctttcatttttggtagctgcttaaacaggttgcctaattagcagcttttgggtgattttgtaaaatgttatatcaagatttcaagactgtgtacattttaaattatttccaaagatagtgacaggagagaactggaacaaatttaccaactttgtggacctacaaagcccttacactttaaagggtaagacaaaggcttaagtttgaaaggtagagaactgtttagcatctgagaagaaatactttattaggcctgtaattttggttcttggccttaaacactttctggaacctttaaatatgctgcatagcacaatgggaaagccttaggtattcacacatttaaggaactctaaacaaaatactattttcctttagttcatattaaaaattaatacattttaaaaatttaatgtcaaagtctggtaacatttgttagtaggatttgagttattattttttgagacaggatctcaggctggagtgcagtggcacaatcacggctcactgcagcctctacctccccaggctcaggtgatcctcccacctcagcctcccaagtagctgggactataggcacacatcaccaagcccagccaaattttgttttttttttgtagagatggggtttcatcacgttgcccaggctgatctcgaacctctgggctcaagcaattcactcgcctcggcctcccaaaatgctgggattacaggcctgagccactgcgcccagccaggatttgaattattttaactcatccatgggctgccctagaatgtcacaaatgagggttgtttaatgcctttcttatagctgctactggaacactattatgacctaatttatgagccatccttactcatctacaagtgctgaagcaatgttacatacttttttgctaaactcagattttttagcctaatttcttgtcctcctatccacctgcatccacacatggcctgcatggggctgccttccctgcagtgttctgcagccatgcttcagggtatagctgttggtggacagcctcaggtcttgggggcactatagccactaaacgaggtgtgaaaggctcaagaggatgaccagcaattaattatccccagaaagtgaaggaaaagagacctttagggatgttgctggtcaagtcttgatttgaccggagtcaaatcaatcttcaagcaatcttggaatcctcaactgcagtaagcatttcaaaatgcaaacaaactgcttaacaactgacaagacaccagcccatatgctgctcttccaacagtgggttctagctttgaacaaaagtgctaaacatttccttgaatatattcttcctctttttgtcctcatcactcaatactggtgctcttgtcacaggtagaacagcttgtttcttttccatctattcaagtgtgtttctaattctaaaatgctgatcttctctggagtctatggtaggcaattatggtcactggaatagtttgtcttgttttaaaatattattggtgcatgtacaacagcatccaacatatctgtcttgttcctagatatatagctctgattttaggccttttgtgcataccattacaatatggtggggtaagacattctacagtagcctgtgctgaactgatctcttaaataaacttgcttctggttaactaaaaaaaaaaaaaaaaaaaaa

SEQ ID NO: 301 - DNA, 1535 bp, Homo sapiens
  NIP3
cctccgctcagtccgggagcgcacgtgggccgcggcgctccgacctccgctttcccaccgcccgcagctgaagcacatcccgcagcccggcgcggactccgatcgccgcagttgccctctggcgccatgtcgcagaacggagcgcccgggatgcaggaggagagcctgcagggctcctgggtagaactgcacttcagcaataatgggaacgggggcagcgttccagcctcggtttctatttataatggagacatggaaaaaatactgctggacgcacagcatgagtctggacggagtagctccaagagctctcactgtgacagcccacctcgctcgcagacaccacaagataccaacagggcttctgaaacagatacccatagcattggagagaaaaacagctcacagtctgaggaagatgatattgaaagaaggaaagaagttgaaagcatcttgaagaaaaactcagattggatatgggattggtcaagtcggccggaaaatattccccccaaggagttcctctttaaacacccgaagcgcacggccaccctcagcatgaggaacacgagcgtcatgaagaaagggggcatattctctgcagaatttctgaaagttttccttccatctctgctgctctctcatttgctggccatcggattggggatctatattggaaggcgtctgacaacctccaccagcaccttttgatgaagaactggagtctgacttggttcgttagtggattacttctgagcttgcaacatagctcactgaagagctgttagatcctggggtggccacgtcacttgtgtttatttgttctgtaaatgctgcgttcctaatttagtaaaataaaagaatagacactaaaatcatgttgatctataattacacctatgggatcaataagcatgtcagactgattaatgtctactgtgaaaatttggtagtaaattttcatttgatattagatataaatatctgaatataaataattttaatatactagtcatgatgtgtgttgtattttaaaaattatctgcaaccttaattcagctgaagtactttatatttcaaaagaatgaataacattgataataaaatcgctactttaaggggtttgtccaaaataaatattgtggccttatatatcacactattgtagaaagtattatttaatttaaatggatgcaggttgtctactaaagaaagattatatataactatgctaattgttcataatcaacagaaaccaagatagagctacaaactcagctgtacagttcgtacactaaactcttcttgcttttgcattataaggaattaagtctccgattattaggtgatcaccctggatgatcagttttctgctgaaggcacctactcagtatcttttcctctttatcactctgcattggtgaatttaatcctctcctttgtgttcaacttttgtgtgcttttaaaatcagctttattctaagcaaatctgtgtctactttaaaaaactggaaatggaaaaaaaaataaatctt

SEQ ID NO: 302 - DNA, 789 bp, Homo sapiens
  NIP3
gccaccgcccgcagctgaagcacatccgcagcccggcgcgactccgatcgccgcagttgccctctggcgccatgtccgagaacggagcgcccgggatgcaggaggagagcctgcagggctcctgggtagaactgcacttcagcaataatgggaacgggggcagcgttccagcctcggtttctatttataatggagacatggaaaaaatactgctggacgcacagcatgagtctggacggagtagctccaagagctctcactgtgacagcccacctcgctcgcagacaccacaagataccaacagggcttctgaaacagatacccatagcattggagagaaaaacagctcacagtctgaggaagatgatattgaaagaaggaaagaagttgaaagcatcttgaagaaaaactcagattggatatgggattggtcaagtcggccggaaaatattccccccaaggagttcctctttaaacacccgaagcgcacggccaccctcagcatgaggaacacgagcgtcatgaagaaagggggcatattctctgcagaatttctgaaagttttccttccatctctgctgctctctcatttgctggccatcggattggggatctatattggaaggcgtctgacaacctccaccagcaccttttgatgaagaactggagtctgacttggttcgttagtggattacttctgagcttgcaacatagctcactgaagagctgttagatcctgggccttcgtggctcgagagactagaatcgcagatacgaaaaccccgcagc

SEQ ID NO: 303 - DNA, 1752 bp, Homo sapiens
  Dig2; REDD1; REDD-1; RTP801; FLJ20500; RP11-442H21.1
agggcgcagcaggccaagggggaggtgcgagcgtggacctgggacgggtctgggcggctctcggtggttggcacgggttcgcacacccattcaagcggcaggacgcacttgtcttagcagttctcgctgaccgcgctagctgcggcttctacgctccggcactctgagttcatcagcaaacgccctggcgtctgtcctcaccatgcctagcctttgggaccgcttctcgtcgtcgtccacctcctcttcgccctcgtccttgccccgaactcccaccccagatcggccgccgcgctcagcctgggggtcggcgacccgggaggaggggtttgaccgctccacgagcctggagagctcggactgcgagtccctggacagcagcaacagtggcttcgggccggaggaagacacggcttacctggatggggtgtcgttgcccgacttcgagctgctcagtgaccctgaggatgaacacttgtgtgccaacctgatgcagctgctgcaggagagcctggcccaggcgcggctgggctctcgacgccctgcgcgcctgctgatgcctagccagttggtaagccaggtgggcaaagaactactgcgcctggcctacagcgagccgtgcggcctgcggggggcgctgctggacgtctgcgtggagcagggcaagagctgccacagcgtgggccagctggcactcgaccccagcctggtgcccaccttccagctgaccctcgtgctgcgcctggactcacgactctggcccaagatccaggggctgtttagctccgccaactctcccttcctccctggcttcagccagtccctgacgctgagcactggcttccgagtcatcaagaagaagctgtacagctcggaacagctgctcattgaggagtgttgaacttcaacctgagggggccgacagtgccctccaagacagagacgactgaacttttggggtggagactagaggcaggagctgagggactgattcctgtggttggaaaactgaggcagccacctaaggtggaggtgggggaatagtgtttcccaggaagctcattgagttgtgtgcgggtggctgtgcattggggacacatacccctcagtactgtagcatgaaacaaaggcttaggggccaacaaggcttccagctggatgtgtgtgtagcatgtaccttattatttttgttactgacagttaacagtggtgtgacatccagagagcagctgggctgctcccgccccagcccggcccagggtgaaggaagaggcacgtgctcctcagagcagccggagggaggggggaggtcggaggtcgtggaggtggtttgtgtatcttactggtctgaagggaccaagtgtgtttgttgtttgttttgtatcttgtttttctgatcggagcatcactactgacctgttgtaggcagctatcttacagacgcatgaatgtaagagtaggaaggggtgggtgtcagggatcacttgggatctttgacacttgaaaaattacacctggcagctgcgtttaagccttcccccatcgtgtactgcagagttgagctggcaggggaggggctgagagggtgggggctggaacccctccccgggaggagtgccatctgggtcttccatctagaactgtttacatgaagataagatactcactgttcatgaatacacttgatgttcaagtattaagacctatgcaatattttttacttttctaataaacatgtttgttaaaacagtt

SEQ ID NO: 304 - DNA, 567 bp, Homo sapiens
  SLC25A30
tttttttttcagagttactaataggattttattatttaagtgtaaaatcagtttccccccctttcccatttctctgatttctaaggaaaaacggcaccaggggacccaggagggtggtcccattggggtgaaccctaactccacagccctgcttgcagactcttcctccccaccctgggcgtccctcctctcccatgccctagggcctcagtcactcttctccgtgggctgaggctggtgcactggacaaaggctgtccctccacaggtggtaggtgagggctgaagtcacggtgagccaggctaggtagggcagcagtaacagggcagccagtttgttgatgggatgccagatcagtgctgtgctcaccaccagcccatacagcagcagcaggtgcagcagggccagaccagggttgtggactgtgaaaaagagaaccaggacagtccagctgatggtgagctgaacagcatagaggccaagaggcagggccaggggccaccccaagccctctcccaggtccttccacaccaggtaggaggcatagcccacgacagagtagatggc

SEQ ID NO: 305 - DNA, 2188 bp, Homo sapiens
  H10; H1FV; MGC5241
gggaggcagaggaggcggaggcagaggcagaggcagagcccggtgccgagaccaagcgacagaccggcggggctgggcctcgcaaagccggctcggcgagctctcccgacacccgagccggggaggaaaagcagcgactcctcgctcgcatccccgggagccgcactccagactggcccggtagtcaggggctcaggagcagatcccgaggcaggctttgctcagcctccgacgagggctggccctttggaaggcgccttcaacagccggaccagacaggccaccatgaccgagaattccacgtccgcccctgcggccaagcccaagcgggccaaggcctccaagaagtccacagaccaccccaagtattcagacatgatcgtggctgccatccaggccgagaagaaccgcgctggctcctcgcgccagtccattcagaagtatatcaagagccactacaaggtgggtgagaacgctgactcgcagatcaagttgtccatcaagcgcctggtcaccaccggtgtcctcaagcagaccaaaggggtgggggcctcggggtccttccggctagccaagagcgacgaacccaagaagtcagtggccttcaagaagaccaagaaggaaatcaagaaggtagccacgccaaagaaggcatccaagcccaagaaggctgcctccaaagccccaaccaagaaacccaaagccaccccggtcaagaaggccaagaagaagctggctgccacgcccaagaaagccaaaaaacccaagactgtcaaagccaagccggtcaaggcatccaagcccaaaaaggccaaaccagtgaaacccaaagcaaagtccagtgccaagagggccggcaagaagaagtgacaatgaagtcttttcttgcggacactccctcctgtctcctattttctgtaaataattttctccttttttctctcttgatgctcaccaccaccttttgcccccttctgttctgactttataagagacaggatttggattcttcagaaattacagaataattcatttttccttaaccagttgtgcaaggacagcaacaaccaatctaatgatgagaatgtacttatattttgttttgctattaacctacttacggggttagggatttgcgggggggcttgtgtgttttgttggcttgtttgccatgaaggtagatgtgggtggggagaagacacaaggcagtttgttctggctagatgagagggaacccaggaattgtgaggttagcaggaatatctttagggtgagtgagttttccttgagttgggcacccgttgtgagagtttcagaacctttggccagcaggagagaggtggtagggagcagccagccggcaaaggaaggaggtggaaaaaaaccgccaccgggctgacttccacctcccagtggtgagcagtgggggcccaaacccagtttccttctcatttttgttagtttgccctttcggcctccctattttcttagggaaggggagtggggtccaagtgacagctggatgggagaagccatagtttctcccagtcagctaggatgtagccattgggggatctttgtggcttcagcaaattctcttgttaaaccggagtgaaaacttcaggggaagggtggggagtcagccaagtgcctcagtgtgccctgttgaaacttaggtttttccacgcaatcgatggattgtgtcctaggaagacttttcttttcctctggatttttgttcctcctgtacaagaggtgtctttgcttggtttggtggggctgcggccacttaaaacctcccgatctctttttgagtcctttattataagtagttgtagctgcgggagggggagggggagtgggcgggcagtggatagtaagacttactgcagtcgatttgggatttgctaagtagttttacagagctagatctgtgtgcatgtgtgtgtttgtgtatatatacatatctagggctagtacttagtttcacacccgggagctgggagaaaaaacctgtacagttgtctttctcttatttttaataaaaaaaaaaatcagcgcacttgcgcgtcccccccccacccccttttttaaacaagtgttacttgtgccgggaaaattttgctgtctttgtaattttaaaactttaaaataaattggaaagggagaaaaaaaaaaaaaaaaaaaa

SEQ ID NO: 306 - DNA, 1431 bp, Homo sapiens
  K60; NAF; GCP1; IL-8; LECT; LUCT; NAP1; 3-10C; CXCL8; GCP-1; LYNAP; MDNCF; MONAP; NAP-1; SCYB8; TSG-1; AMCF-I; b-ENAP
gggatttgaaccaggccttctgatttcaaggtccgagctctgtcctctgtcagtcatgcgtccactttcccttcccctgtgactcctcccttccccactctgctcccagcccctaccttgagaccctcttctctgggcccagagagaggcgtcctggtgaggacaaggtacaggcaaggatgatccagggattgggcctgggactcaggcctcctaagtgtttggttcctccctccaaacactcattagttcactcattcattcattccacaaacatttactgagggccccggaatcagtggactccgaggggactgagacaagccctgccctggggtgggggtggggggcaaggtacagttgattctacatttggatagggagtgggggagggtgggaaggtaggggcgggagagtgagggggtttgtaatttattaattttcaggcccctcatttgagagccatttcctcaactccatctaaactgaatcttggggagaacccagatctgaccaattggggtaggagacagcaggctctccaagaacatgggcaaatttatttttttataaaacaaaaagataaaaagagttgaaagacgtgaaagtggtgagagatggaggaaacagaatcaggaagtggtagaaaagagaggaggtggctgggcgcagtggctcacgtttgtaatcccagcactttgggaggccaagttgggcggatcatttgaggtcaggagtttgagaccagcctggccaacatggtgaaaccccgttactactaaaaatacaaaaattagctgggtgtctcgtggcaggcacctgtaatcccagctacttagaaggctgaggcaagagaatcacctgaacccaggaggtggaggttgcagtgagccaagattgcaccactgcactccagcctgggcaacagagcaagaccctgtctcaaaaaaaaaaaaaaaaaaaaaaaaaaacggaaggaaacatcagccttgggggccacagactcaacatgtgtgtgtggtggggttccagcccaacatagagtaacattatttgtacctcccaggctagctcagtccatgggaggctctcctgtccctgaaagctgacacccacctttcaccacttcgcccatgctacagttcagtttcctcgtctgtaaaatggggatgataatggtacctaccttgcagtgttgttataaggattaaaggagacagtgcaagaaaaggccttggttggtgaagagcccaacctcggaggggagctgctgggatcctccttatcttgactgggatgtccctgtctccccctccccttgctccttgaacatggccaaggaaagtgaaaaacaaaaattattcactctgctagcacccttccccttgatgcctgggaataggttttgccaataaacgtatctgtgttgga

SEQ ID NO: 307 - DNA, 5592 bp, Human parvovirus B19
aaatcagatgccgccggtcgccgccggtaggcgggacttccggtacaagatggcggacaattacgtcatttcctgtgacgtcatttcctgtgacgtcacttccggtgggcgggacttccggaattagggttggctctgggccagcttgcttggggttgccttgacactaagacaagcggcgcgccgcttgatcttagtggcacgtcaaccccaagcgctggcccagagccaaccctaattccggaagtcccgcccaccggaagtgacgtcacaggaaatgacgtcacaggaaatgacgtaattgtccgccatcttgtaccggaagtcccgcctaccggcggcgaccggcggcatctgatttggtgtcttcttttaaattttagcgggcttttttcccgccttatgcaaatgggcagccattttaagtgttttactataattttattggtcagttttgtaacggttaaaatgggcggagcgtaggcggggactacagtatatatagcacagcactgccgcagctctttctttctgggctgctttttcctggactttcttgctgttttttgtgagctaactaacaggtatttatactacttgttaatatactaacatggagctatttagaggggtgcttcaagtttcttctaatgttctggactgtgctaacgataactggtggtgctctttactagatttagacacttctgactgggaaccactaactcatactaacagactaatggcaatatacttaagcagtgtggcttctaagcttgaccttaccggggggccactagcagggtgcttgtacttttttcaagcagaatgtaacaaatttgaagaaggctatcatattcatgtggttattggggggccagggttaaaccccagaaacctcacagtgtgtgtagaggggttatttaataatgtactttatcactttgtaactgaaaatgtgaagctaaaatttttgccaggaatgactacaaaaggcaaatactttagagatggagagcagtttatagaaaactatttaatgaaaaaaatacctttaaatgttgtatggtgtgttactaatattgatggatatatagatacctgtatttctgctacttttagaaggggagcttgccatgccaagaaaccccgcattaccacagccataaatgatactagtagcgatgctggggagtctagcggcacaggggcagaggttgtgccatttaatgggaagggaactaaggctagcataaagtttcaaactatggtaaactggttgtgtgaaaacagagtgtttacagaggataagtggaaactagttgactttaaccagtacactttactaagcagtagtcacagtggaagttttcaaattcaaagtgcactaaaactagcaatttataaagcaactaatttagtgcctactagcacatttttattgcatacagactttgagcaggttatgtgtattaaagacaataaaattgttaaattgttactttgtcaaaactatgaccccctattggtggggcagcatgtgttaaagtggattgataaaaaatgtggcaagaaaaatacactgtggttttatgggccgccaagtacaggaaaaacaaacttggcaatggccattgctaaaagtgttccagtatatggcatggttaactggaataatgaaaactttccatttaatgatgtagcaggaaaaagcttggtggtctgggatgaaggtattattaagtctacaattgtagaagctgcaaaagccattttaggcgggcaacccaccagggtagatcaaaaaatgcgtggaagtgtagctgtgcctggagtacctgtggttataaccagcaatggtgacattacttttgttgtaagcgggaacactacaacaactgtacatgctaaagccttaaaagagcgcatggtaaagttaaactttactgtaagatgcagccctgacatggggttactaacagaggctgatgtacaacagtggcttacatggtgtaatgcacaaagctgggaccactatgaaaactgggcaataaactacacttttgatttccctggaattaatgcagatgccctccacccagacctccaaaccaccccaattgtcacagacaccagtatcagcagcagtggtggtgaaagctctgaagaactcagtgaaagcagcttttttaacctcatcaccccaggcgcctggaacactgaaaccccgcgctctagtacgcccatccccgggaccagttcaggagaatcatttgtcggaagcccagtttcctccgaagttgtagctgcatcgtgggaagaagccttctacacacctttggcagaccagtttcgtgaactgttagttggggttgattatgtgtgggacggtgtaaggggtttacctgtgtgttgtgtgcaacatattaacaatagtgggggaggcttgggactttgtccccattgcattaatgtaggggcttggtataatggatggaaatttcgagaatttaccccagatttggtgcgatgtagctgccatgtgggagcttctaatcccttttctgtgctaacctgcaaaaaatgtgcttacctgtctggattgcaaagctttgtagattatgagtaaagaaagtggcaaatggtgggaaagtgatgatgaatttgctaaagctgtgtatcagcaatttgtggaattttatgaaaaggttactggaacagacttagagcttattcaaatattaaaagatcattataatatttctttagataatcccctagaaaacccatcctctctgtttgacttagttgctcgcattaaaaataaccttaaaaattctccagacttatatagtcatcattttcaaagtcatggacagttatctgaccacccccatgccttatcatccagtagcagtcatgcagaacctagaggagaagatgcagtattatctagtgaagacttacacaagcctgggcaagttagcgtacaactacccggtactaactatgttgggcctggcaatgagctacaagctgggcccccgcaaagtgctgttgacagtgctgcaaggattcatgactttaggtatagccaactggctaagttgggaataaatccatatactcattggactgtagcagatgaagagcttttaaaaaatataaaaaatgaaactgggtttcaagcacaagtagtaaaagactactttactttaaaaggtgcagctgcccctgtggcccattttcaaggaagtttgccggaagttcccgcttacaacgcctcagaaaaatacccaagcatgacttcagttaattctgcagaagccagcactggtgcaggaggggggggcagtaatcctgtcaaaagcatgtggagtgagggggccacttttagtgccaactctgtgacttgtacattttctagacagtttttaattccatatgacccagagcaccattataaggtgttttctcccgcagcaagtagctgccacaatgccagtggaaaggaggcaaaggtttgcaccattagtcccataatgggatactcaaccccatggagatatttagattttaatgctttaaacttatttttttcacctttagagtttcagcacttaattgaaaattatggaagtatagctcctgatgctttaactgtaaccatatcagaaattgctgttaaggatgttacagacaaaactggagggggggtgcaggttactgacagcactacagggcgcctatgcatgttagtagaccatgaatacaagtacccatatgtgttagggcaaggtcaagatactttagccccagaacttcctatttgggtatactttccccctcaatatgcttacttaacagtaggagatgttaacacacaaggaatttctggagacagcaaaaaattagcaagtgaagaatcagcattttatgttttggaacacagttcttttcagcttttaggtacaggaggtacagcaactatgtcttataagtttcctccagtgcccccagaaaatttagagggctgcagtcaacacttttatgagatgtacaatcccttatacggatcccgcttaggggttcctgacacattaggaggtgacccaaaatttagatctttaacacatgaagaccatgcaattcagccccaaaacttcatgccagggccactagtaaactcagtgtctacaaaggagggagacagctctaatactggagctgggaaagccttaacaggccttagcacaggtacctctcaaaacactagaatatccttacgcccggggccagtgtctcagccgtaccaccactgggacacagataaatatgtcacaggaataaatgctatttctcatggtcagaccacttatggtaacgctgaagacaaagagtatcagcaaggagtgggtagatttccaaatgaaaaagaacagctaaaacagttacagggtttaaacatgcacacctactttcccaataaaggaacccagcaatatacagatcaaattgagcgccccctaatggtgggttctgtatggaacagaagagcccttcactatgaaagccagctgtggagtaaaattccaaatttagatgacagttttaaaactcagtttgcagccttaggaggatggggtttgcatcagccacctcctcaaatatttttaaaaatattaccacaaagtgggccaattggaggtattaaatcaatgggaattactaccttagttcagtatgccgtgggaattatgacagtaaccatgacatttaaattggggccccgtaaagctacgggacggtggaatcctcaacctggagtatatcccccgcacgcagcaggtcatttaccatatgtactatatgaccctacagctacagatgcaaaacaacaccacagacatggatatgaaaagcctgaagaattgtggacagccaaaagccgtgtgcacccattgtaaacactccccaccgtgccctcagccaggatgcgtaactaaacgcccaccagtaccacccagactgtacctgccccctcctatacctataagacagcctaacacaaaagatatagacaatgtagaatttaagtatttaaccagatatgaacaacatgttattagaatgttaagattgtgtaatatgtatcaaaatttagaaaaataaacgtttgttgtggttaaaaaattatgttgttgcgctttaaaaatttaaaagaagacaccaaatcagatgccgccggtcgccgccggtaggcgggacttccggtacaagatggcggacaattacgtcatttcctgtgacgtcatttcctgtgacgtcacttccggtgggcggaacttccggaattagggttggctctgggccagcgcttggggttgacgtgccactaagatcaagcggcgcgccgcttgtcttagtgtcaaggcaaccccaagcaagctggcccagagccaaccctaattccggaagtcccgcccaccggaagtgacgtcacaggaaatgacgtcacaggaaatgacgtaattgtccgccatcttgtaccggaagtcccgcctaccggcggcgaccggcggcatctgattt

SEQ ID NO: 308 - DNA, 5112 bp, Human parvovirus B19
gaattccgccaaatcagatgccgccggtcgccgccggtaggcgggacttccggtacaagatggcggacaattacgtcatttcctgtgacgtcatttcctgtgacgtcacaggaaatgacgtaattgtccgccatcttgtaccggaagtcccgcctaccggcggcgaccggcggcatctgatttggtgtcttcttttaaattttagcgggcttttttcccgccttatgcaaatgggcagccattttaagtgttttactataattttattggttagttttgtaacggttaaaatgggcggagcgtaggcggggactacagtatatatagcacggtactgccgcagctctttctttctgggctgctttttcctggactttcttgctgttttttgtgagctaactaacaggtatttatactacttgttaacatcctaacatggagctatttagaggggtgcttcaagtttcttctaatgttctagactgtgctaacgataactggtggtgctctttactggatttagacacttctgactgggaaccactaactcatactaacagactaatggcaatatacttaagcagtgtggcttctaagcttgactttaccggggggccactagcagggtgcttgtacttttttcaagtagaatgtaacaaatttgaagaaggctatcatattcatgtggttactggggggccagggttaaaccccagaaaccttacagtgtgtgtagaggggttatttaataatgtactttatcaccttgtaactgaaaatgtgaagctaaaatttttgccaggaatgactacaaaaggcaaatactttagagatggagagcagtttatagaaaactatttaatgaaaaaaatacctttaaatgttgtatggtgtgttactaatattgatggatatatagatacctgtatttctgctacttttagaaggggagcttgccatgccaagaaaccccgcattaccacagccataaatgatactagtagtgatgctggggagtctagcggcacaggggcagaggttgtgccatttaatgggaagggaactaaggctagcataaagtttcaaactatggtaaactggttgtgtgaaaacagagtgtttacagaggataagtggaaactagttgactttaaccagtacactttactaagcagtagtcacagtggaagttttcaaattcaaagtgcactaaaactagcaatttataaagcaactaatttagtgcctactagcacatttttattgcatacagactttgagcaggttatgtgtattaaagacaataaaattgttaaattgttactttgtcaaaactatgaccccctattggtggggcagcatgtgttaaagtggattgataaaaaatgtggtaagaaaaatacactgtggttttatgggccgccaagtacaggaaaaacaaacttggcaatggccattgctaaaagtgttccagtatatggcatggttaactggaataatgaaaactttccatttaatgatgtagcaggaaaaagcttggtggtctgggatgaaggtattattaagtctacaattgtagaagctgcaaaagccattttaggcgggcaacccaccagggtagatcaaaaaatgcgtggaagtgtagctgtgcctggagtacctgtggttataaccagcaatggtgacattacttttgttgtaagcgggaacactacaacaactgtacatgctaaagccttaaaagagcgcatggtaaagttaaactttactgtaagatgcagccctgacatggggttactaacagaggctgatgtacaacagtggcttacatggtgtaatgcacaaagctgggaccactatgaaaactgggcaataaactacacttttgatttccctggaattaatgcagatgccctccacccagacctccaaaccaccccaattgtcacagacaccagtatcagcagcagtggtggtgaaagctctgaagaactcagtgaaagcagcttttttaacctcatcaccccaggcgcctggaacactgaaaccccgcgctctagtacgcccatccccgggaccagttcaggagaatcatttgtcggaagcccagtttcctccgaagttgtagctgcatcgtgggaagaagccttctacacacctttggcagaccagtttcgtgaactgttagttggggttgattatgtgtgggacggtgtaaggggtttacctgtgtgttgtgtgcaacatattaacaatagtgggggagggttgggactttgtccccattgcattaatgtaggggcttggtataatggatggaaatttcgagaatttaccccagatttggtgcgatgtagctgccatgtgggagcttctaatcccttttctgtgctaacctgcaaaaaatgtgcttacctgtctggattgcaaagctttgtagattatgagtaaaaaaagtggcaaatggtgggaaagtgatgataaatttgctaaagctgtgtatcagcaatttgtggaattttatgaaaaggttactggaacagacttagagcttattcaaatattaaaagatcattataatatttctttagataatcccctagaaaacccatcctctctgtttgacttagttgctcgtattaaaaataaccttaaaaactctccagacttatatagtcatcattttcaaagtcatggacagttatctgaccacccccatgccttatcatccagtagcagtcatgcagaacctagaggagaaaatgcagtattatctagtgaagacttacacaagcctgggcaagttagcgtacaactacccggtactaactatgttgggcctggcaatgagctacaagctgggcccccgcaaagtgctgttgacagtgctgcaaggattcatgactttaggtatagccaactggctaagttgggaataaatccatatactcattggactgtagcagatgaagagcttttaaaaaatataaaaaatgaaactgggtttcaagcacaagtagtaaaagactactttactttaaaaggtgcagctgcccctgtggcccattttcaaggaagtttgccggaagttcccgcttacaacgcctcagaaaaatacccaagcatgacttcagttaattctgcagaagccagcactggtgcaggaggggggggcagtaattctgtcaaaagcatgtggagtgagggggccacttttagtgctaactctgtaacttgtacattttccagacagtttttaattccatatgacccagagcaccattataaggtgttttctcccgcagcgagtagctgccacaatgccagtggaaaggaggcaaaggtttgcaccatcagtcccataatgggatactcaaccccatggagatatttagattttaatgctttaaatttatttttttcacctttagagtttcagcacttaattgaaaattatggaagtatagctcctgatgctttaactgtaaccatatcagaaattgctgttaaggatgttacagacaaaactggagggggggtacaggttactgacagcactacagggcgcctatgcatgttagtagaccatgaatacaagtacccatatgtgttagggcaaggtcaggatactttagccccagaacttcctatttgggtatactttccccctcaatatgcttacttaacagtaggagatgttaacacacaaggaatttctggagacagcaaaaaattagcaagtgaagaatcagcattttatgttttggaacacagttcttttcagcttttaggtacaggaggtacagcatctatgtcttataagtttcctccagtgcccccagaaaatttagagggctgcagtcaacacttttatgaaatgtacaatcccttatacggatcccgcttaggggttcctgacacattaggaggtgacccaaaatttagatctttaacacatgaagaccatgcaattcagccccaaaacttcatgccagggccactagtaaactcagtgtctacaaaggagggagacagctctaatactggagctggaaaagccttaacaggccttagcacaggtacctctcaaaacactagaatatccttacgccctgggccagtgtctcagccataccaccactgggacacagataaatatgtcacaggaataaatgccatttctcatggtcagaccacttatggtaacgctgaagacaaagagtatcagcaaggagtgggtagatttccaaatgaaaaagaacagctaaaacagttacagggtttaaacatgcacacctactttcccaataaaggaacccagcaatatacagatcaaattgagcgccccctaatggtgggttctgtatggaacagaagagcccttcactatgaaagccagctgtggagtaaaattccaaatttagatgacagttttaaaactcagtttgcagccttaggaggatggggtttgcatcagccacctcctcaaatatttttaaaaatattaccacaaagtgggccaattggaggtattaaatcaatgggaattactaccttagttcagtatgccgtgggaattatgacagtaactatgacatttaaattggggccccgtaaagctacgggacggtggaatcctcaacctggagtatatcccccgcacgcagcaggtcatttaccatatgtactatatgaccccacagctacagatgcaaaacaacaccacagacatggatatgaaaagcctgaagaattgtggacagccaaaagccgtgtgcacccattgtaaacactccccaccgtgccctcagccaggatgcgtaactaaacgcccaccagtaccacccagactgtacctgccccctcctgtacctataagacagcctaacacaaaagatatagacaatgtagaatttaagtacttaaccagatatgaacaacatgttattagaatgttaagattgtgtaatatgtatcaaaatttagaaaaataaacatttgttgtggttaaaaaattatgttgttgcgctttaaaaatttaaaagaagacaccaaatcagatgccgccggtcggccggtaggcgggacttccggtacaagatggcggaattc

SEQ ID NO: 309 - DNA, 21 bp, Artificial Sequence
  Description of Artificial Sequence: Synthetic primer
tacctgtctggattgcaaagc

SEQ ID NO: 310 - DNA, 23 bp, Artificial Sequence
  Description of Artificial Sequence: Synthetic primer
gatgggttttctaggggattatc

SEQ ID NO: 311 - DNA, 29 bp, Artificial Sequence
  Description of Artificial Sequence: Synthetic probe
atggtgggaaagtgatgatgaatttgcta

SEQ ID NO: 312 - DNA, 19 bp, Artificial Sequence
  Description of Artificial Sequence: Synthetic primer
cctgggcaagttagcgtac

SEQ ID NO: 313 - DNA, 21 bp, Artificial Sequence
  Description of Artificial Sequence: Synthetic primer
atgatccttgcagcactgtca

SEQ ID NO: 314 - DNA, 17 bp, Artificial Sequence
  Description of Artificial Sequence: Synthetic probe
tatgttgggcctggcaa

SEQ ID NO: 315 - DNA, 20 bp, Artificial Sequence
  Description of Artificial Sequence: Synthetic primer
gttttatgggccgccaagta

SEQ ID NO: 316 - DNA, 21 bp, Artificial Sequence
  Description of Artificial Sequence: Synthetic primer
atcccagaccaccaagctttt

SEQ ID NO: 317 - DNA, 20 bp, Artificial Sequence
  Description of Artificial Sequence: Synthetic probe
ccattgctaaaagtgttcca

SEQ ID NO: 318 - DNA, 19 bp, Artificial Sequence
  Description of Artificial Sequence: Synthetic primer
ggcacccagcacaatgaag

SEQ ID NO: 319 - DNA, 20 bp, Artificial Sequence
  Description of Artificial Sequence: Synthetic primer
gccgatccacacggagtact

SEQ ID NO: 320 - DNA, 26 bp, Artificial Sequence
  Description of Artificial Sequence: Synthetic probe
tcaagatcattgctcctcctgagcgc

SEQ ID NO: 321 - DNA, 19 bp, Artificial Sequence
  Description of Artificial Sequence: Synthetic primer
gttttttgtgagctaacta

SEQ ID NO: 322 - DNA, 21 bp, Artificial Sequence
  Description of Artificial Sequence: Synthetic primer
ccacgatgcaagctacaactt
